(19) United States
(12) Patent Application Publication
(10) Pub. No.: US 2014/0296079 A1
(43) Pub. Date: Oct. 2, 2014

(54) METHODS FOR EARLY DETECTION OF ESOPHAGEAL CANCER

(71) Applicant: NEOGENOMICS LABORATORIES, Fort Myers, FL (US)

(72) Inventor: Maher Albitar, Valley Center, CA (US)

(73) Assignee: NEOGENOMICS LABORATORIES, Fort Myers, FL (US)

(21) Appl. No.: 14/096,003

(22) Filed: Dec. 3, 2013

Related U.S. Application Data
(60) Provisional application No. 61/732,618, filed on Dec. 3, 2012.

(51) Int. Cl. C12Q 1/68

(52) U.S. Cl. CPC C12Q 1/6886; G06F 19/22
USPC 506/2; 506/9; 702/20

(57) ABSTRACT

The present invention relates to a method for screening, predicting or prognosing esophageal adenocarcinoma/high grade dysplasia in a subject.

### RELATED APPLICATIONS

[0001] This application claims the benefit of the priority of U.S. provisional application No. 61/732,618, filed Dec. 3, 2012.

### FIELD OF THE INVENTION

[0002] The present invention relates to a method for screening, predicting or prognosing esophageal adenocarcinoma/high grade dysplasia in a subject.

### BACKGROUND OF THE INVENTION

[0003] Esophageal adenocarcinoma (EAC) is a deadly cancer with five-year survival rate around 17%. The incidence of esophageal cancer is increasing at a dramatic rate in the United States. The development of esophageal adenocarcinoma (EAC), in the vast majority of instances, occurs as a result of a pre-cancerous condition of the esophagus, called Barrett's Esophagus, which carries up to a 60-fold increased risk of developing EAC.

[0004] Barrett's esophagus (BE) is a preneoplastic condition in which the squamous epithelium of the distal esophagus undergoes transformation to intestinal metaplasia (IM). It is estimated to affect 10% to 12% of patients with chronic gastroesophageal reflux disease, the most significant known risk factor in the development of BE, as well as 6% of those without symptoms. Patients with BE are approximately 125 times more likely to develop carcinoma than the general population. The evolution to cancer from Barrett's epithelium is generally accepted to be a multistep progression as follows: (1) IM without dysplasia, (2) low-grade dysplasia (LGD), (3) high-grade dysplasia (HGD), and (4) esophageal adenocarcinoma (EA).

[0005] BE is caused by long-standing or severe cases of Gastro-esophageal Reflux Disorder, more commonly known as GERD, in which stomach acid repeatedly refluxes up into the lower portion of the esophagus damaging and inflaming the tissue. The constant exposure to acid and inflammatory damage may cause permanent genomic abnormalities in individual dividing cells. These genomic abnormalities in the appropriate combination may eventually lead to overt cancerous growth. However, frequently prior to overt cancer, various degrees of morphologic and genetic abnormalities can be seen and these morphologically manifest as low or high grade dysplasia. Prior to dysplasia, the normal esophagus squamous epithelium is replaced by an abnormal columnar epithelium, called specialized intestinal metaplasia in patients with BE.

[0006] The most common symptom of GERD is heartburn, although people may also experience extra-esophageal symptoms from reflux like chronic cough, chronic sore throat, allergy or flu like symptoms, even sleep apnea. In many cases, there may be no symptoms at all. Patients diagnosed with heartburn symptoms, who also have other risk factors, are typically referred for further evaluation by a gastroenterologist. Patients diagnosed with extra-esophageal symptoms, such as chronic cough or sore throat, are typically referred for further evaluation by an otolaryngologist or ear, nose, and throat (ENT) physician.

[0007] The American College of Gastroenterology recommends that people diagnosed with BE should be monitored for the development of dysplasia and EAC by undergoing regular endoscopic examinations of the esophagus and obtaining four-quadrant biopsies at 1 to 2 cm intervals of the affected esophagus. Recommended follow-up intervals are based on the absence, or presence, of dysplasia and if present, the degree of dysplasia. Frequently, dysplasia progresses or regresses due to acid suppression therapy. So it is important to adjust follow-up intervals based on recent changes in status until confirmed.

[0008] However, dysplasia evaluation is subjective and varies significantly dependent on the pathologist experience and the provided samples. Furthermore, sampling can be very serious limiting factor and despite the multiple biopsy sampling, a lesion could be easily missed. It has been suggested that brushing of the esophageal mucosa may be more representative. However, morphologic evaluation of the cytologic sample from brushing is very difficult when the goal is to determine the level of dysplasia.

[0009] Studies suggested that fluorescent in situ hybridization (FISH) testing can help distinguish cancer or high grade dysplasia from normal or low grade dysplasia. Work by Fritcher et al. assessed the relative sensitivity and specificity of conventional cytology, DNA ploidy analysis with digital image analysis (DIA), and fluorescence in situ hybridization (FISH) for the detection of dysplasia and adenocarcinoma in endoscopic brushing specimens from 92 patients undergoing endoscopic surveillance for BE. See, Fritcher et al., Human Pathology, 2008 August; 39(8): 1128-1135.

[0010] The findings from this study suggest that FISH has high sensitivity for the detection of dysplasia and EA in BE patients, with the power to stratify patients by FISH abnormality for progression to HGD/EA. Using FISH, a greater number of chromosomal alterations were detected as the severity of histologic diagnosis increased from intestinal metaplasia to adenocarcinoma. See, Brankley, et al., Human Pathology, 2012 February; 43(2):172-179. Four genes have been identified as being statistically significant in the progression from BE to HGD/EA include: p16 gene (9p21), HER2 gene (17q12), MYC gene (8q24), and ZFN 217 gene (20q13.2). Preliminary tests based on these genes have been reported but additional work is still needed to develop a clinical test that can interpret the relative importance of the data generated during the test to quickly and reliably render a diagnostic decision.

[0011] Therefore, a reliable method for early detection of esophageal cancer is crucial but has yet to be discovered. Provided herein, is a solution to this unmet need.

### SUMMARY

[0012] In various embodiments, provided herein is a method for the early detection of cancerous changes in the esophagus. This method takes advantage of performing pan-brushing of the esophageal mucosa (thorough sampling) and performing very sensitive high throughput genomic analysis using Next Generation sequencing (objective and sensitive testing). The detection of mutations in driver genes in the brushing samples is reliable objective method for early detection of EAC.

[0013] In some embodiments, the use of next generation sequencing (NGS) in a combination with brushing approach for screening for the presence of high grade dysplasia or EAC in patients with BE. In these embodiments, sampling by brushing allows surveying of the entire esophagus and the NGS allows testing of a small DNA sample for mutations in numerous oncogenes and tumor suppressor genes.

[0014] In various embodiments, provided herein is a method for identifying esophageal adenocarcinoma (EAC) in a subject comprising: pan-brushing the esophageal mucosa of the subject to obtain a sample; isolating DNA from the sample; performing next generation sequencing (NGS) on the isolated DNA; and analyzing the sequencing results and identifying any genomic abnormalities in one or more driver genes, wherein an abnormality indicates the subject has esophageal adenocarcinoma. In specific embodiments, the entire esophageal mucosa is pan-brushed.

[0015] In some embodiments the one or more driver genes are oncogenes or tumor suppressor genes. In specific embodiments the one or more driver genes are selected from the group comprising:

| | | | |
|---|---|---|---|
| ABL1 | EGFR | GNAS | MLH1 |
| SEQ ID | SEQ ID | SEQ ID | SEQ ID |
| NO. 1 | NO. 2 | NO. 3 | NO. 4 |
| RET | AKT1 | ERBB2 | CSF1R |
| SEQ ID | SEQ ID | SEQ ID | SEQ ID |
| NO. 5 | NO. 6 | NO. 7 | NO. 8 |
| HNF1A | MPL | SMAD4 | ALK |
| SEQ ID | SEQ ID | SEQ ID | SEQ ID |
| NO. 9 | NO. 10 | NO. 11 | NO. 12 |
| ERBB4 | HRAS | NOTCH1 | GNAQ |
| SEQ ID | SEQ ID | SEQ ID | SEQ ID |
| NO. 13 | NO. 14 | NO. 15 | NO. 16 |
| SMARCB1 | APC | FBXW7 | IDH1 |
| SEQ ID | SEQ ID | SEQ ID | SEQ ID |
| NO. 17 | NO. 18 | NO. 19 | NO. 20 |
| ATM | FGFR1 | MET | JAK2 |
| SEQ ID | SEQ ID | SEQ ID | SEQ ID |
| NO. 21 | NO. 22 | NO. 23 | NO. 24 |
| BRAF | FGFR2 | JAK3 | PDGFRA |
| SEQ ID | SEQ ID | SEQ ID | SEQ ID |
| NO. 25 | NO. 26 | NO. 27 | NO. 28 |
| STK11 | RB1 | CDH1 | FGFR3 |
| SEQ ID | SEQ ID | SEQ ID | SEQ ID |
| NO. 29 | NO. 30 | NO. 31 | NO. 32 |
| KDR | PIK3CA | TP53 | CDKN2A |
| SEQ ID | SEQ ID | SEQ ID | SEQ ID |
| NO. 33 | NO. 34 | NO. 35 | NO. 36 |
| FLT3 | KIT | PTEN | VHL |
| SEQ ID | SEQ ID | SEQ ID | SEQ ID |
| NO. 37 | NO. 38 | NO. 39 | NO. 40 |
| PTPN11 | CTNNB1 | KRAS | GNA11 |
| SEQ ID | SEQ ID | SEQ ID | SEQ ID |
| NO. 41 | NO. 42 | NO. 43 | NO. 44 |
| NRAS | SRC | NPM1 | SMO |
| SEQ ID | SEQ ID | SEQ ID | SEQ ID |
| NO. 45 | NO. 46 | NO. 47 | NO. 48 |

[0016] In some embodiments one or more of these genes are completely sequenced and analyzed. In other embodiments, all of these genes are completely sequenced and analyzed.

[0017] In some embodiments, an abnormality in at least one gene indicates the subject has esophageal adenocarcinoma. In other embodiment an abnormality in 2-8 genes indicates the subject has esophageal adenocarcinoma.

[0018] In specific embodiments, the sequencing is step is performed using the ILLUMINA® MISEQ® sequencer, or an equivalent thereto. In some embodiments, the analysis is performed using multiple filters.

[0019] In some embodiments, 5% prevalence for the abnormality indicates the subject has esophageal adenocarcinoma. In other embodiments, 10% prevalence for the abnormality indicates the subject has esophageal adenocarcinoma.

[0020] In one embodiment, a method for determining the risk of having HGD/Esophageal cancer, including the steps of: performing fluorescence in situ hybridization (FISH) testing on esophageal biopsy samples taken from a patient known or suspected to have Barrett's esophagus (BE); generating values corresponding to each of a plurality of data points obtained during FISH testing, the plurality of data points including data selected from the group consisting of average signals of each of four probes (MYC, 9p21, HER2, and ZNF217), percentage of cells with multiple gains, percentage of cells with single gains, percentage of cells with 9p21 hemizygous deletion, percentage of cells with 9p21 homozygous deletion, percentage of cells with tetrasomy, and percentage of cells with gains and deletions; applying an algorithm to the values to generate a numerical score; comparing the numerical score to one or more thresholds, wherein the threshold defines a distinction between HGD/EC and normal or non-HGD/EC. In various embodiments, the one or more thresholds comprise:

[chemical structure]

[0021] In another aspect of the invention, a method is provided for morphologic evaluation of BE histology, including the steps of performing fluorescence in situ hybridization (FISH) testing on esophageal biopsy samples taken from a patient known or suspected to have Barrett's esophagus (BE); generating values corresponding to each of a plurality of data points obtained during FISH testing, the plurality of data points including data selected from the group consisting of average signals of each of four probes (MYC, 9p21, HER2, and ZNF217), percentage of cells with multiple gains, percentage of cells with single gains, percentage of cells with 9p21 hemizygous deletion, percentage of cells with 9p21 homozygous deletion, percentage of cells with tetrasomy, and percentage of cells with gains and deletions; applying an algorithm to the values to generate a numerical score; comparing the numerical score to one or more thresholds, wherein the threshold defines a distinction between HGD/EC and normal or non-HGD/EC.

[0022] In still another aspect of the invention, a method is provided for determining the prognosis of BE, including the steps of performing fluorescence in situ hybridization (FISH) testing on esophageal biopsy samples taken from a patient known or suspected to have Barrett's esophagus (BE); generating values corresponding to each of a plurality of data points obtained during FISH testing, the plurality of data points including data selected from the group consisting of average signals of each of four probes (MYC, 9p21, HER2, and ZNF217), percentage of cells with multiple gains, percentage of cells with single gains, percentage of cells with 9p21 hemizygous deletion, percentage of cells with 9p21 homozygous deletion, percentage of cells with tetrasomy, and percentage of cells with gains and deletions; applying an algorithm to the values to generate a numerical score; comparing the numerical score to one or more thresholds, wherein the threshold defines a distinction between HGD/EC and normal or non-HGD/EC.

[0023] In various embodiments, provided herein is a method is provided for classifying cancer/HGD vs. normal, intestinal metaplasia, or normal using a FISH test based on the four genes: p16 gene (9p21), HER2 gene (17q12), MYC gene (8q24), and ZFN 217 gene (20q13.2). A step-wise algorithm is used to interpret ten different variables obtained from the FISH test to generate a classification for diagnosis. The algorithm represents a tool for putting each of these variables into its proper context for providing a diagnosis with a high degree of sensitivity. In some embodiments, the testing sensitivity is about 86%. In other embodiments, the testing sensitivity is about 67%. In various embodiments, the following algorithm is used to apply thresholds to variable values to generate a positive or negative indication:

[chemical structure]

[0024] In one aspect of the invention, a method if provided for determining the risk of having HGD/Esophageal cancer, including the steps of: performing fluorescence in situ hybridization (FISH) testing on esophageal biopsy samples taken from a patient known or suspected to have Barrett's esophagus (BE); generating values corresponding to each of a plurality of data points obtained during FISH testing, the plurality of data points including data selected from the group consisting of average signals of each of four probes (MYC, 9p21, HER2, and ZNF217), percentage of cells with multiple gains, percentage of cells with single gains, percentage of cells with 9p21 hemizygous deletion, percentage of cells with 9p21 homozygous deletion, percentage of cells with tetrasomy, and percentage of cells with gains and deletions; applying an algorithm to the values to generate a numerical score; comparing the numerical score to one or more thresholds, wherein the threshold defines a distinction between HGD/EC and normal or non-HGD/EC. In these embodiments, the one or more thresholds comprise:

[chemical structure]

and a positive result indicates a high risk of having High Grade Dysplasia (HGD)/Esophageal Adenocardinoma (EAC) and a negative result indicates a low risk of having HGD/EAC and is suggestive or normal, reactive, or low grade dysplasia.

[0025] In another aspect of the invention, a method is provided for morphologic evaluation of BE histology, including the steps of performing fluorescence in situ hybridization (FISH) testing on esophageal biopsy samples taken from a patient known or suspected to have Barrett's esophagus (BE); generating values corresponding to each of a plurality of data points obtained during FISH testing, the plurality of data points including data selected from the group consisting of average signals of each of four probes (MYC, 9p21, HER2, and ZNF217), percentage of cells with multiple gains, percentage of cells with single gains, percentage of cells with 9p21 hemizygous deletion, percentage of cells with 9p21 homozygous deletion, percentage of cells with tetrasomy, and percentage of cells with gains and deletions; applying an algorithm to the values to generate a numerical score; comparing the numerical score to one or more thresholds, wherein the threshold defines a distinction between HGD/EC and normal or non-HGD/EC.

[0026] In still another aspect of the invention, a method is provided for determining the prognosis of BE, including the steps of performing fluorescence in situ hybridization (FISH) testing on esophageal biopsy samples taken from a patient known or suspected to have Barrett's esophagus (BE); generating values corresponding to each of a plurality of data points obtained during FISH testing, the plurality of data points including data selected from the group consisting of average signals of each of four probes (MYC, 9p21, HER2, and ZNF217), percentage of cells with multiple gains, percentage of cells with single gains, percentage of cells with 9p21 hemizygous deletion, percentage of cells with 9p21 homozygous deletion, percentage of cells with tetrasomy, and percentage of cells with gains and deletions; applying an algorithm to the values to generate a numerical score; comparing the numerical score to one or more thresholds, wherein the threshold defines a distinction between HGD/EC and normal or non-HGD/EC.

### BRIEF DESCRIPTION OF THE DRAWINGS

[0027] FIG. 1 is an illustrative tile blot showing the results of next generation sequencing gene by gene according to one embodiment.

[0028] FIG. 2A is a table listing the Barrett's FISH probe set according to one embodiment.

[0029] FIG. 2B is a sample image of a FISH signal pattern of normal esophageal cells with 2 signals of each of 4 probes of FIG. 2A: MYC, HER2, p16 and ZNF217.

[0030] FIG. 2C is a sample image of a FISH signal pattern of a normal cell with 2 signals of each of 4 probes.

[0031] FIG. 2D is a sample image of a FISH signal pattern of an abnormal cell with varying numbers of signals of each of 4 probes. (Note that not all signals of each probe are labeled.)

[0032] FIG. 2E is a sample image of a FISH signal pattern in normal tissue. Although not all visible or individually labeled, it can be seen that the numbers of signals for each of the probes are relatively uniform.

[0033] FIG. 2F is a sample image of a FISH signal pattern in abnormal tissue, where individual cells in the tissue exhibit many signals for several of the probes.

[0034] FIG. 3 provides the %9p21 Hemizygous+%9p21 Homozygous in N-LGD and HGD/CA according to one embodiment. Cut-off≧2, sensitivity=0.79, specificity=0.06.

[0035] FIG. 4 provides the %9p21 Hemizygous+%9p21 Homozygous+% Multiple gains in N-LGD and HGD/CA according to one embodiment. Cut-off≧3, sensitivity=0.86, specificity=0.44 and Cut-off≧7, sensitivity=0.57, specificity=0.88.

[0036] FIG. 5 provides the %9p21 Hemizygous+%9p21 Homozygous+% Multiple gains+ZNF217 signals (N−2) in N-LGD and HGD/CA according to one embodiment. Cut-off≧8, sensitivity=0.57, specificity=0.88.

### DETAILED DESCRIPTION OF THE INVENTION

[0037] The above description of the disclosed embodiments is provided to enable any person skilled in the art to make or use the invention. Various modifications to these embodiments will be readily apparent to those skilled in the art, and the generic principles described herein can be applied to other embodiments without departing from the spirit or scope of the invention. Thus, it is to be understood that the description and drawings presented herein represent a presently preferred embodiment of the invention and are therefore representative of the subject matter which is broadly contemplated by the present invention. It is further understood that the scope of the present invention fully encompasses other embodiments that may become obvious to those skilled in the art and that the scope of the present invention is accordingly not limited.

[0038] All patents and publications referred to herein are incorporated by reference in their entirety.

### Certain Exemplary Terminology

[0039] Unless defined otherwise, all technical and scientific terms used herein have the same meaning as is commonly understood by one of skill in the art to which the claimed subject matter belongs. In the event that there is a plurality of definitions for terms herein, those in this section prevail. Where reference is made to a URL or other such identifier or address, it is understood that such identifiers can change and particular information on the internet can come and go, but equivalent information can be found by searching the internet. Reference thereto evidences the availability and public dissemination of such information.

[0040] It is to be understood that the foregoing general description and the following detailed description are exemplary and explanatory only and are not restrictive of any subject matter claimed. In this application, the use of the singular includes the plural unless specifically stated otherwise. It must be noted that, as used in the specification and the appended claims, the singular forms “a,” “an” and “the” include plural referents unless the context clearly dictates otherwise. In this application, the use of “or” means “and/or” unless otherwise stated. Furthermore, use of the term “including” as well as other forms, such as “include”, “includes,” and “included,” is not limiting.

[0041] The section headings used herein are for organizational purposes only and are not to be construed as limiting the subject matter described. All documents, or portions of documents, cited in the application including, but not limited to, patents, patent applications, articles, books, manuals, and treatises are hereby expressly incorporated by reference in their entirety for any purpose.

[0042] While preferred embodiments of the present invention have been shown and described herein, it will be obvious to those skilled in the art that such embodiments are provided by way of example only. Numerous variations, changes, and substitutions will now occur to those skilled in the art without departing from the invention. It should be understood that various alternatives to the embodiments of the invention described herein may be employed in practicing the invention. It is intended that the appended claims define the scope of the invention and that methods and structures within the scope of these claims and their equivalents be covered thereby. Abbreviations used herein have their conventional meaning within the chemical and biological arts.

[0043] Unless defined otherwise, all technical and scientific terms used herein have the same meaning as is commonly understood by one of skill in the art to which this invention belongs.

[0044] All patents and publications referred to herein are incorporated by reference.

[0045] Having now generally described the invention, the same will be more readily understood through reference to the following examples which are provided by way of illustration, and are not intended to be limiting of the present invention, unless specified.

### EXAMPLES

### Example 1

### Ancillary Four-Probe FISH Test for Diagnosis of Esophageal Cancer

[0046] A FISH test based on the four genes: p16 gene (9p21) (SEQ ID NO. 49; Accession #AB049820), HER2 gene (17q12) (SEQ ID NO. 50; Accession # NM_{—}131089), MYC gene (8q24 (SEQ ID NO. 51; Accession #M16261), and ZEN 217 gene (20q13.2) (SEQ ID NO. 52; Accession #NM_{—}006526) was performed to classify cancer (high grade dysplasia/adenocarcinoma) vs. normal or intestinal metaplasia cells.

[0047] A step-wise algorithm was used to interpret ten different variables obtained from the FISH test to generate a classification for diagnosis. The algorithm was shown to represent a tool for putting each of these variables into its proper context for providing a diagnosis with a high degree of sensitivity (86%). The sensitivity in initial testing was 67%.

[0048] The algorithm used applies thresholds to variable values to generate a positive or negative indication was:

[chemical structure]

[0049] The specimens used for the FISH test consisted of esophageal brushings from 57 patients with Barrett's or suspicious of Barrett's with final diagnosis based on biopsies at the time of brushing or at earlier time. Fourteen (25%) had HGD/CA (2 had CA) and thirteen (30%) of the non HGD/CA had LGD. In this study, data was collected for the following ten variables:
[0050] (1-4) Average signals of each of four probes (MYC, 9p21, HER2, and ZNF217) (see, e.g., FIGS. 2A-2F);
[0051] (5) Percentage of cells with multiple gains;
[0052] (6) Percentage of cells with single gains;
[0053] (7) Percentage of cells with 9p21 hemizygous deletion;
[0054] (8) Percentage of cells with 9p21 homozygous deletion;
[0055] (9) Percentage of cells with tetrasomy; and
[0056] (10) Percentage of cells with gains and deletions.

[0057] Statistical analysis included assay results compared among groups using Wilcoxon Rank Sum and Fisher exact test, and Receiver Operation Characteristics (ROC).

| Feature | AUC | Pvalue | FDR |
|---|---|---|---|
| Hemizygous 9p21 | 0.71 | 0.01 | 0.11 |
| ZNF217 | 0.69 | 0.02 | 0.08 |
| MultipleGains | 0.69 | 0.03 | 0.06 |
| Homozygous 9p21 | 0.66 | 0.02 | 0.09 |
| HER2 | 0.64 | 0.11 | 0.18 |
| SingleGains | 0.61 | 0.2 | 0.25 |
| GainsNDeletions | 0.6 | 0.1 | 0.21 |
| P16 | 0.54 | 0.66 | 0.74 |
| Tetrasomy | 0.53 | 0.11 | 0.16 |
| MYC | 0.53 | 0.76 | 0.76 |

[0058] A “positive” result using the above algorithm indicates a high risk of having High Grade Dysplasia (HGD)/Esophageal adenocarcinoma (EAC). A “negative” result indicates a low risk of having HGD/EAC and suggests normal, reactive, or low grade dysplasia.

[0059] The inventive algorithm may be used as part of an ancillary test that can be used to support existing monitoring procedures such as endoscopies and biopsies.

### Example 2

### Pan Brushing of the Esophageal Mucosa

[0060] Pan-brushing of the entire esophageal mucosa of patients with BE was performed using a standard well develop protocol. Samples were collected and shipped for testing in PreservCyt fixative.

[0061] DNA was isolated from brushing samples using automated DNA extraction method. Sequencing was performed on all brushing samples using ILLUMINA® MISEQ® sequencing system Complete sequencing of the following genes was performed. The corresponding SEQ ID NOs and Genbank Accession Numbers are provided below each gene name, and sequence listings are provided herewith as well as being publicly available from The National Center for Biotechnology Information (NCBI) via the World Wide Web at ncbi.nlm.nih.gov, which information is incorporated herein by reference.

| | | | |
|---|---|---|---|
| ABL1 | EGFR | GNAS | MLH1 |
| (SEQ ID | (SEQ ID | (SEQ ID | (SEQ ID |
| NO. 1) | NO. 2) | NO. 3) | NO. 4) |
| M30833 | M38425 | NM_080426 | FJ940753 |
| RET | AKT1 | ERBB2 | CSF1R |
| (SEQ ID | (SEQ ID | (SEQ ID | (SEQ ID |
| NO. 5) | NO. 6) | NO. 7) | NO. 8) |
| Y12528 | AF283830 | M86910 | M33208 |
| HNF1A | MPL | SMAD4 | ALK |
| (SEQ ID | (SEQ ID | (SEQ ID | (SEQ ID |
| NO. 9) | NO. 10) | NO. 11) | NO. 12) |
| NM_000545 | NM_005373 | AB043547 | U62540 |
| ERBB4 | HRAS | NOTCH1 | GNAQ |
| (SEQ ID | (SEQ ID | (SEQ ID | (SEQ ID |
| NO. 13) | NO. 14) | NO. 15) | NO. 16) |
| L07868 | AF493916 | NM-017617 | U40038 |
| SMARCB1 | APC | FBXW7 | IDH1 |
| (SEQ ID | (SEQ ID | (SEQ ID | (SEQ ID |
| NO. 17) | NO. 18) | NO. 19) | NO. 20) |
| DQ230988 | M74088 | NM_033632 | NM_005896 |
| NPM1 | ATM | FGFR1 | MET |
| (SEQ ID | (SEQ ID | (SEQ ID | (SEQ ID |
| NO. 47) | NO. 21) | NO. 22) | NO. 23) |
| NM_002520 | U82828 | FJ809917 | J02958 |
| JAK2 | BRAF | FGFR2 | JAK3 |
| (SEQ ID | (SEQ ID | (SEQ ID | (SEQ ID |
| NO. 24) | NO. 25) | NO. 26) | NO. 27) |
| NM_004972 | NM_004333 | Z71929 | Y70065 |
| SRC | PDGFRA | STK11 | RB1 |
| (SEQ ID | (SEQ ID | (SEQ ID | (SEQ ID |
| NO. 46) | NO. 28) | NO. 29) | NO. 30) |
| NM_005417 | M21574 | NM_000455 | M33647 |
| CDH1 | FGFR3 | KDR | PIK3CA |
| (SEQ ID | (SEQ ID | (SEQ ID | (SEQ ID |
| NO. 31) | NO. 32) | NO. 33) | NO. 34) |
| L34936 | M58051 | NM_002253 | NM_006218 |
| Z35480 | | | |
| TP53 | CDKN2A | FLT3 | KIT |
| (SEQ ID | (SEQ ID | (SEQ ID | (SEQ ID |
| NO. 35) | NO. 36) | NO. 37) | NO. 38) |
| U94788 | GU086367 | NM_004119 | U63834 |
| | | | X66237 |
| | | | X72595- |
| | | | X72615 |
| PTEN | VHL | PTPN11 | CTNNB1 |
| (SEQ ID | (SEQ ID | (SEQ ID | (SEQ ID |
| NO. 39) | NO. 40) | NO. 41) | NO. 42) |
| AF143312 | AF010238 | EU779708 | AY463360 |
| | U19763 | | |
| | U49746, | | |
| | U68055 | | |
| | U68176 | | |
| KRAS | GNA11 | NRAS | SMO |
| (SEQ ID | (SEQ ID | (SEQ ID | (SEQ ID |
| NO. 43) | NO. 44) | NO. 45) | NO. 48) |
| M54968 | AF493900 | AF493919 | NM_005631 |
| M38506 | | | |

[0062] Analysis was performed using multiple filters to avoid overcalling of mutations. Samples were analyzed using 5% and 10% prevalence for the abnormalities. Mutations are considered only when they meet the criteria of being “deleterious” as determined by the SIFT database. Based on analyzing 27 esophageal brushing samples and comparing results with FISH testing and morphologic evaluation of randomly obtained biopsies, clearly our method of brushing and NGS is more sensitive and more objective in detecting EAC.

[0063] The tile plot of genomic abnormalities (FIG. 1) and the table of the results of the 27 samples (Table 1) show significant genomic abnormalities in 20 of 27 (74%) of testing samples. Notably, 9 of the 21 (43%) cases that had biopsy data were wrongly classified by morphology while only 8 of the 27 cases (30%) showed discrepancy between NGS and FISH, which is more objective than morphology.

TABLE 1

| Sample # | FISH data | Histo Dx | NGS Results |
|---|---|---|---|
| BE3 | Positive | Negative | Positive: VHL |
| BE4 | Negative | Negative | Negative: 0 |
| BE8 | Positive | Positive | Positive: FGFR3, ABL1, ATM |
| BE9 | Negative | Negative | Positive: NRAS, CSF1R, SMO, NOTCH1, ATM |
| BE10 | Negative | Negative | Positive: NRAS, ERBB4, IDH1, PIK3CA, VHL, |
| | | | FBXW7, KIT, APC, SMO, GNAQ, RET, PTPN11, |
| | | | RB1, SMAD4, GNA11, JAK3, STK11, GNAS |
| BE11 | Positive | NA | Negative: 0 |
| BE12 | Positive | NA | Positive: ABL1, FBXW7 |
| BE15 | Negative | NA | Positive: HNF1A |
| BE20 | Negative | NA | Negative: 0 |
| BE23 | Negative | NA | Negative: 0 |
| BE25 | Negative | NA | Negative: 0 |
| BE37 | Positive | Negative | Positive: PIK3CA, PDGFRA, FBXW7, APC, EGFR, |
| | | | HNF1A, GNAS |
| BE38 | Positive | Positive | Positive: FGFR3, FBXW7, APC, MET, NOTCH1, |
| | | | ATM, HNF1A, TP53, SMAD4, GNA11 |
| BE39 | Negative | Positive | Positive: ERBB4, MLH1, KIT, APC, BRAF, ABL1, |
| | | | PTPN11, HNF1A, FLT3, RB1, TP53, SMAD4, |
| | | | GNA11, |
| BE40 | Positive | Positive | Positive: ALK, ERBB4, PIK3CA, FBXW7, MET, |
| | | | SMO, GNAQ, PTEN, ATM, HRAS, PTPN11, ATM, |
| | | | HNF1A, AKT1, TP53, SMAD4, GNAS |
| BE43 | Positive | Negative | Positive: ERBB4, ALK, EGFR3, PDGFRA, FBXW7, |
| | | | KDR, APC, MET, RET, PTEN, FLT3, ERBB2, TP53, |
| | | | SMAD4, |
| BE45 | Positive | Negative | Negative: 0 |
| BE48 | Positive | Negative | Positive: EGFR, NOTCH1, HNF1A, TP53 |
| BE49 | Negative | Positive | Positive: APC, MET, HNF1A, |
| BE57 | Positive | Negative | Positive: PIK3CA, VHL, KIT, APC, NPM1, EGFR, |
| | | | MET, RET, PTEN, FGFR2, ATM, KRAS, HNF1A, |
| | | | RB1, ERBB2, TP53, GNA11 |
| BE58 | Negative | Negative | Positive: HNF1A, RB1, JAK3 |
| BE59 | Negative | Negative | Positive: RET, HNF1A, RB1 |
| BE60 | Positive | Negative | Positive: ERBB4, PIK3CA, FGFR3, HNF1A, AKT1 |
| BE81 | Negative | Positive | Positive: VHL, EGFR, SMO, RET, TP53 |
| BE82 | Positive | Positive | Positive: ERBB4, FBXW7, KDR, APC, BRAF, MET, |
| | | | GNAQ, PTEN, ATM, PTPN11, RB1, CDH1, TP53, |
| | | | SMAD4 |
| BE83 | Positive | Positive | Positive: ALK, ERBB4, FGFR3, KIT, APC, GNAQ, |
| | | | ABL1, KRAS, HNF1A, TP53, GNA11 |
| BE84 | Negative | Negative | Positive: ERBB4, IDH1, FBXW7, KIT, PDGFRA, |
| | | | APC, FGFR2, PTEN, ATM, FLT3, CDH1, |
| | | | TP53, GNA11 |

[0064] In summary, combining esophageal brushing and NGS provides a reliable new method for the early detection of EAC. Table 1 provides a comparison of esophageal brushing/NGS with FISH on brushing and biopsies.

The application's sequence listing, which the Patent Office published only in electronic form, follows.

SEQUENCE LISTING (52 sequences)

SEQ ID NO: 1 - DNA, 494 bp, Homo sapiens
cgcggccgccctgggcgggcgcgggcggcgggcggcggtgagggcggcctgcggggcggcgcccgggggccgggccgagccgggcctgagccgggcccggaccgagctgggagaggggctccggcccgatcgttcgcttggcgcaaaatgttggagatctgcctgaagctggtgggctgcaaatccaagaaggggctgtcctcgtcctccagctgttatctggaagaagcccttcagcggccagtagcatctgactttgagcctcagggtctgagtgaagccgctcgttggaactccaaggaaaaccttctcgctggacccagtgaaaatgaccccaaccttttcgttgcactgtatgattttgtggccagtggagataacactctaagcataactaaaggtgaaaagctccgggtcttaggctataatcacaatggggaatggtgtgaaccccaaaccaaaaatggccaaggctgggtcccaagcaactacat

SEQ ID NO: 2 - DNA, 3888 bp, Homo sapiens
aagcttccgcgagtttcccaggcatttctcctcgcgggactaccaggggtagtgggacacttagcctctctaaaagcacctccacggctgtttgtgtcaagcctttattccaagagcttcacttttgcgaagtaatgtgcttcacacattggcttcaaagtacccatggctggttgcaataaacattaaggaggcctgtctctgcacccggagttggtgccctcatttcagatgatttcgagggtgcttgacaagatctgaaggaccctcggactttagagcaccacctcggaacgcctggcacccctgccgcgcgggcacggcgacctcctcagctgccaggccagcctctgatccccgcgaggggtcccgtagtgctgcagggggaggctggggacccgaataaaggagcagtttccccgtcggtgccattatccgacgctggctctaaggctcggccagtctgtctaaagctggtacaagtttgctttgtaaaacaaaagaagggaaagggggaaggggaccctggcacagatttggctcgacctggacataggctgggctgcaagtccgcggggaccgggtccagaggggcagtgctgggaacgcccctctcggaaattaactcctcagggcaccgctcccctcccatgcgccgccccactcccgccggagactaggtcccgcgggggccaccgtgtccaccgcctcgcggccgctggccttgggtccccgctgctggttctcctccctcctcctcgcattctcctcctcctctgctcctcccgatccctcctccgccgcctggtccctcctcctcccgccctgcctcccgcgcctcggcccgcgcgagctagacgtccgggcagcccccggcgcagcgcggccgcagcagcctcctccccccgcacggtgtgagcgcccgccgcgccgaggcggccggagtcccgagctagccccgcggccgccgccgcccagaccggacgacaggccacctcgtcgcgtccgcccgagtccccgcctcgccgccaacgccacaaccaccgcgcacggccccctgactccgtccagtattgatcgggagagccggagcgagctcttcggggagcagcgatgcgaccctccgggacggccggggcagcgctcctggcgctgctggctgcgctctgcccggcgagtcgggctctggaggaaaagaaaggtaagggcgtgtctcgcggctccccgccgcccccggatcgcgccccggaccccgcagcccgcccaaccgcaccgcgcaccggcttcgcccgcgcccccgcccgtcctttcctgtttccttgagatcacgtgcgccgccgaccgggaccgcgggaggaacgggacgtttcgttcttcggccgggagagtctggggcgggcggaggaggagacgcgtgggacaccgggctgcaggccaggcggggaacggccgccgggacctccggcgccccgaaccgctcccaactttcttccctcactttccccgcccagctgcgcaggatcggcgtcagtgggcgaaagccgggtgctggtgggcgcctggggccggggtcccgcacgggctccccgcgctgtcttcccagggcgcgacggggtcctggcgcgcacccgagggccgctgcccacccgccgagactgcctgtttagggaagctgaggaaggaacccaaaaatacagcctccgctcggaccccgcgggacaggcggctttctgagaggacctccccgcctccgcgctccgcgcaggtctcaaactgaagccggcgcccgccagcctggccccggcccctctccaggtccccgcgatcctcgttccccagtgtggagtcgcagcctcgacctgggagctgggagaactcgtctaccaccacctgcggctcccggggaggggtggtgctggcggcggttagtttcctcgttggcaaaaggcaggtggggtccgacccgccccttgggcgcagaccccggccgctcgcctcgcccggtgcgccctcgtcttgcctatccaagagtgccccccactcccgggaccccagctccctccgcgcccgcgccgaaagccccaggctctccttcgatggccgcctcgcggagacgtccgggtctgctccacctgcagcccttcggtcgcgcctgggcttcgcggtggagcgggacgcggctgtccggccactgcagggggggatcgcgggactcttgagcggaagccccggaagcagagctcatcctggccaacaccatggtgtttcaaaatggggctcacagcaaacttctcctcaaaacccggagactttctttcttggatgtctctttttgctgtttgaagaatttgagccaaccaaaatattaaacctgtcttacacacacacacacacacacacacacacacacaccggattgctgtccctggttcaagtgtgccaagtgtgcagaagaacatgagcgagtctggcttcgtgactaccgaccataaacccacttgacaggggaaacatgccttggaaggtttaattgcacaattccaaccttgactgcgcgggttccaagagccaggcccgtacttgctgttgatgtcattggcttggggagttggggtttggtgcccagcgcggtcgttgggggaggggcggaaggcatagaacagtggttccctgcgcccttctgcacattggaattacctgggattaaaaaaaaaaaatcaaaacaaaaaccagtgtctcgtcccgcccccagacattctgatttaattggcatggggcaagacctggacttgggattttttttaatgctcttcatgtgatctgttgggcagccagatttggggatcactagacggaagaaggattgttaaagtctccggagatgttacttgccaatgctaagagctctttgagacatctggaattgttacaatattgccaaatataggaaagagggaaaaggtagagtgtgattccaataataaaggattccgcttttcattgaaggaactggtggaaaggtttcttctctgctagacctgcaggcccgtcctgcctgcctggggcgcccgggagacgcgggcctgctccggagactgctgactgccggtcctgttagtcaggtgtcagccctgtctctgccgaagagactcttctctttattttaaattaaaccctcagagcaccaccaaagcatcacttttctccctccattggtgttctcattctttgatgttacttgtttgaacaccactattagtagttggagatttgttcctgagaaaaatataaataccacttaatttgcctgtttgtcccgcattcactcaaaacagaatgctcctgaagacaagagagagagtaggagaacagacgctattccattacagtaacataaaagactggattttcaggggcaaattattaaaataggagatgagctcttttaacagaaatttgtttaaggcctgtgtctatcaaattcagtggattttattcaagatgcactttgtttagtgggagttttgtttggttctgggacatgctaacttctagacttgctgctcttagaggtaatgactgccagacaccatttcatgagtcctaatccccacattaagcataagaggtgcacactctcctcctatgggggaaactgaggtacgaagaactaaagtgactttcccacagctggtgggaggcagacgggaaattcacaccaggggcttccaactccagatccctctctcaacttccaaactccactgccttgtccgagttctggtttcaggagatccaaatcaggtgtgtgcaaatgtctaatgtcagagctggcaaggggaaagggcccagggagccggctcatgacgatgagcctgtctgaagctt

SEQ ID NO: 3 - DNA, 1884 bp, Homo sapiens
ggcgggggcccggccgaggcaataagagcggcggcggcggcagcggcggcagcagctcccgcagctcctgctctggtccgcctcggcccggcggcggccatcagccccctcggcctcggctcgaggggcggggagctgcgcgcgcccctcggtccgaccgacaccctccccttcccgcccgtccgcgcgccccgcggcccgcggcccgcagtccgccccgcgcgctccttgccgaggagccgagcccgcgcccggcccgcccgcccggcgctgccccggccctcccggcccgcgtgaggccgcccgcgcccgccgccgccgcagcccggccgcgccccgccgccgccgccgccgccatgggctgcctcgggaacagtaagaccgaggaccagcgcaacgaggagaaggcgcagcgtgaggccaacaaaaagatcgagaagcagctgcagaaggacaagcaggtctaccgggccacgcaccgcctgctgctgctgggtgctggagaatctggtaaaagcaccattgtgaagcagatgaggatcctgcatgttaatgggtttaatggagacagtgagaaggcaaccaaagtgcaggacatcaaaaacaacctgaaagaggcgattgaaaccattgtggccgccatgagcaacctggtgccccccgtggagctggccaaccccgagaaccagttcagagtggactacatcctgagtgtgatgaacgtgcctgactttgacttccctcccgaattctatgagcatgccaaggctctgtgggaggatgaaggagtgcgtgcctgctacgaacgctccaacgagtaccagctgattgactgtgcccagtacttcctggacaagatcgacgtgatcaagcaggctgactatgtgccgagcgatcaggacctgcttcgctgccgtgtcctgacttctggaatctttgagaccaagttccaggtggacaaagtcaacttccacatgtttgacgtgggtggccagcgcgatgaacgccgcaagtggatccagtgcttcaacgatgtgactgccatcatcttcgtggtggccagcagcagctacaacatggtcatccgggaggacaaccagaccaaccgcctgcaggaggctctgaacctcttcaagagcatctggaacaacagatggctgcgcaccatctctgtgatcctgttcctcaacaagcaagatctgctcgctgagaaagtccttgctgggaaatcgaagattgaggactactttccagaatttgctcgctacactactcctgaggatgctactcccgagcccggagaggacccacgcgtgacccgggccaagtacttcattcgagatgagtttctgaggatcagcactgccagtggagatgggcgtcactactgctaccctcatttcacctgcgctgtggacactgagaacatccgccgtgtgttcaacgactgccgtgacatcattcagcgcatgcaccttcgtcagtacgagctgctctaagaagggaacccccaaatttaattaaagccttaagcacaattaattaaaagtgaaacgtaattgtacaagcagttaatcacccaccatagggcatgattaacaaagcaacctttcccttcccccgagtgattttgcgaaacccccttttcccttcagcttgcttagatgttccaaatttagaaagcttaaggcggcctacagaaaaaggaaaaaaggccacaaaagttccctctcactttcagtaaaaataaataaaacagcagcagcaaacaaataaaatgaaataaaagaaacaaatgaaataaatattgtgttgtgcagcattaaaaaaaatcaaaataaaaattaaatgtgagcaaagaatgaaaaaaaaaaaaaaaaaaaa

SEQ ID NO: 4 - DNA, 168 bp, Homo sapiens
cctgttttttggttttattttttgttttgcagttctccgggagatgttgcataaccactccgtgggctgtgtgaatcctcagtgggccttggcacagcatcaaaccaagttataccttctcaacaccaccaagcttaggtaaatcagctgagtgtgtgaacaagcaga

SEQ ID NO: 5 - DNA, 270 bp, Homo sapiens
atggcgaaggcgacgtccggtgccgcggggctgcgtctgctgttgctgctgctgctgccgctgctaggcaaagtggcattgggcctctacttctcgagggatgcttactgggagaagctgtatgtggaccaggcggccggcacgcccttgctgtacgtccatgccctgcgggacgcccctgaggaggtgcccagcttccgcctgggccagcatctctacggcacgtaccgcacacggctgcatgagaacaactggatctgcatccaggag

SEQ ID NO: 6 - DNA, 264 bp, Homo sapiens
aggttggcttcctactggagctgtgggtgggtggaggtggcagggaggtggggcaccggggtctgagctgtctacacccacagatgacagcatggagtgtgtggacagcgagcgcaggccccacttcccccagttctcctactcggccagcagcacggcctgaggcggcggtggactgcgctggacgatagcttggagggatggagaggcggcctcgtgccatgatctgtatttaatggtttttatttctcgggtgcatttgag

SEQ ID NO: 7 - DNA, 188 bp, Homo sapiens
aagtacacgatgcggagactgctgcaggaaacggaggtgaggcggggtgaagtcctcccagcccgcgtggggtctgcaccggcccccagcactgacccaccaccccctcaccccagctggtggagccgctgacacctagcggagcgatgcccaaccaggcgcagatgcggatcctgaaagagacggag

SEQ ID NO: 8 - DNA, 184 bp, Homo sapiens
tgagcctgtccctctgcaggacccatctatatcatcactgagtactgccgctacggagacctggtggactacctgcaccgcaacaaacacaccttcctgcagcaccactccgacaagcgccgcccgcccagcgcggagctctacagcaatgctctgcccgttgggctccccctgcccaggtacc

SEQ ID NO: 9 - DNA, 3241 bp, Homo sapiens
cgtggccctgtggcagccgagccatggtttctaaactgagccagctgcagacggagctcctggcggccctgctcgagtcagggctgagcaaagaggcactgatccaggcactgggtgagccggggccctacctcctggctggagaaggccccctggacaagggggagtcctgcggcggcggtcgaggggagctggctgagctgcccaatgggctgggggagactcggggctccgaggacgagacggacgacgatggggaagacttcacgccacccatcctcaaagagctggagaacctcagccctgaggaggcggcccaccagaaagccgtggtggagacccttctgcaggaggacccgtggcgtgtggcgaagatggtcaagtcctacctgcagcagcacaacatcccacagcgggaggtggtcgataccactggcctcaaccagtcccacctgtcccaacacctcaacaagggcactcccatgaagacgcagaagcgggccgccctgtacacctggtacgtccgcaagcagcgagaggtggcgcagcagttcacccatgcagggcagggagggctgattgaagagcccacaggtgatgagctaccaaccaagaaggggcggaggaaccgtttcaagtggggcccagcatcccagcagatcctgttccaggcctatgagaggcagaagaaccctagcaaggaggagcgagagacgctagtggaggagtgcaatagggcggaatgcatccagagaggggtgtccccatcacaggcacaggggctgggctccaacctcgtcacggaggtgcgtgtctacaactggtttgccaaccggcgcaaagaagaagccttccggcacaagctggccatggacacgtacagcgggccccccccagggccaggcccgggacctgcgctgcccgctcacagctcccctggcctgcctccacctgccctctcccccagtaaggtccacggtgtgcgctatggacagcctgcgaccagtgagactgcagaagtaccctcaagcagcggcggtcccttagtgacagtgtctacacccctccaccaagtgtcccccacgggcctggagcccagccacagcctgctgagtacagaagccaagctggtctcagcagctgggggccccctcccccctgtcagcaccctgacagcactgcacagcttggagcagacatccccaggcctcaaccagcagccccagaacctcatcatggcctcacttcctggggtcatgaccatcgggcctggtgagcctgcctccctgggtcctacgttcaccaacacaggtgcctccaccctggtcatcggcctggcctccacgcaggcacagagtgtgccggtcatcaacagcatgggcagcagcctgaccaccctgcagcccgtccagttctcccagccgctgcacccctcctaccagcagccgctcatgccacctgtgcagagccatgtgacccagagccccttcatggccaccatggctcagctgcagagcccccacgccctctacagccacaagcccgaggtggcccagtacacccacacgggcctgctcccgcagactatgctcatcaccgacaccaccaacctgagcgccctggccagcctcacgcccaccaagcaggtcttcacctcagacactgaggcctccagtgagtccgggcttcacacgccggcatctcaggccaccaccctccacgtccccagccaggaccctgccggcatccagcacctgcagccggcccaccggctcagcgccagccccacagtgtcctccagcagcctggtgctgtaccagagctcagactccagcaatggccagagccacctgctgccatccaaccacagcgtcatcgagaccttcatctccacccagatggcctcttcctcccagtaaccacggcacctgggccctggggcctgtactgcctgcttggggggtgatgagggcagcagccagccctgcctggaggacctgagcctgccgagcaaccgtggcccttcctggacagctgtgcctcgctccccactctgctctgatgcatcagaaagggagggctctgaggcgccccaacccgtggaggctgctcggggtgcacaggagggggtcgtggagagctaggagcaaagcctgttcatggcagatgtaggagggactgtcgctgcttcgtgggatacagtcttcttacttggaactgaagggggcggcctatgacttgggcacccccagcctgggcctatggagagccctgggaccgctacaccactctggcagccacacttctcaggacacaggcctgtgtagctgtgacctgctgagctctgagaggccctggatcagcgtggccttgttctgtcaccaatgtacccaccgggccactccttcctgccccaactccttccagctagtgacccacatgccatttgtactgaccccatcacctactcacacaggcatttcctgggtggctactctgtgccagagcctggggctctaacgcctgagcccagggaggccgaagctaacagggaaggcaggcagggctctcctggcttcccatccccagcgattccctctcccaggccccatgacctccagctttcctgtatttgttcccaagagcatcatgcctctgaggccagcctggcctcctgcctctactgggaaggctacttcggggctgggaagtcgtccttactcctgtgggagcctcgcaacccgtgccaagtccaggtcctggtggggcagctcctctgtctcgagcgccctgcagaccctgcccttgtttggggcaggagtagctgagctcacaaggcagcaaggcccgagcagctgagcagggccggggaactggccaagctgaggtgcccaggagaagaaagaggtgaccccagggcacaggagctacctgtgtggacaggactaacactcagaagcctgggggcctggctggctgagggcagttcgcagccaccctgaggagtctgaggtcctgagcactgccaggagggacaaaggagcctgtgaacccaggacaagcatggtcccacatccctgggcctgctgctgagaacctggccttcagtgtaccgcgtctaccctgggattcaggaaaaggcctggggtgacccggcaccccctgcagcttgtagccagccggggcgagtggcacgtttatttaacttttagtaaagtcaaggagaaatgcggtggaaaaa

SEQ ID NO: 10 - DNA, 3645 bp, Homo sapiens
cctgaagggaggatgggctaaggcaggcacacagtggcggagaagatgccctcctgggccctcttcatggtcacctcctgcctcctcctggcccctcaaaacctggcccaagtcagcagccaagatgtctccttgctggcatcagactcagagcccctgaagtgtttctcccgaacatttgaggacctcacttgcttctgggatgaggaagaggcagcgcccagtgggacataccagctgctgtatgcctacccgcgggagaagccccgtgcttgccccctgagttcccagagcatgccccactttggaacccgatacgtgtgccagtttccagaccaggaggaagtgcgtctcttctttccgctgcacctctgggtgaagaatgtgttcctaaaccagactcggactcagcgagtcctctttgtggacagtgtaggcctgccggctccccccagtatcatcaaggccatgggtgggagccagccaggggaacttcagatcagctgggaggagccagctccagaaatcagtgatttcctgaggtacgaactccgctatggccccagagatcccaagaactccactggtcccacggtcatacagctgattgccacagaaacctgctgccctgctctgcagaggcctcactcagcctctgctctggaccagtctccatgtgctcagcccacaatgccctggcaagatggaccaaagcagacctccccaagtagagaagcttcagctctgacagcagagggtggaagctgcctcatctcaggactccagcctggcaactcctactggctgcagctgcgcagcgaacctgatgggatctccctcggtggctcctggggatcctggtccctccctgtgactgtggacctgcctggagatgcagtggcacttggactgcaatgctttaccttggacctgaagaatgttacctgtcaatggcagcaacaggaccatgctagctcccaaggcttcttctaccacagcagggcacggtgctgccccagagacaggtaccccatctgggagaactgcgaagaggaagagaaaacaaatccaggactacagaccccacagttctctcgctgccacttcaagtcacgaaatgacagcattattcacatccttgtggaggtgaccacagccccgggtactgttcacagctacctgggctcccctttctggatccaccaggctgtgcgcctccccaccccaaacttgcactggagggagatctccagtgggcatctggaattggagtggcagcacccatcgtcctgggcagcccaagagacctgttatcaactccgatacacaggagaaggccatcaggactggaaggtgctggagccgcctctcggggcccgaggagggaccctggagctgcgcccgcgatctcgctaccgtttacagctgcgcgccaggctcaacggccccacctaccaaggtccctggagctcgtggtcggacccaactagggtggagaccgccaccgagaccgcctggatctccttggtgaccgctctgcatctagtgctgggcctcagcgccgtcctgggcctgctgctgctgaggtggcagtttcctgcacactacaggagactgaggcatgccctgtggccctcacttccagacctgcaccgggtcctaggccagtaccttagggacactgcagccctgagcccgcccaaggccacagtctcagatacctgtgaagaagtggaacccagcctccttgaaatcctccccaagtcctcagagaggactcctttgcccctgtgttcctcccaggcccagatggactaccgaagattgcagccttcttgcctggggaccatgcccctgtctgtgtgcccacccatggctgagtcagggtcctgctgtaccacccacattgccaaccattcctacctaccactaagctattggcagcagccttgaggacaggctcctcactcccagttccctggacagagctaaactctcgagacttctctgtgaacttccctaccctacccccacaacacaagcaccccagacctcacctccatccccctctgtctgccctcacaattaggcttcattgcactgatcttactctactgctgctgacataaaaccaggaccctttctccacaggcaggctcatttcactaagctcctcctttactttctctctcctctttgatgtcaaacgccttgaaaacaagcctccacttccccacacttcccatttactcttgagactacttcaattagttcccctactacactttgctagtgaaactgcccaggcaaagtgcacctcaaatcttctaattccaagatccaataggatctcgttaatcatcagttcctttgatctcgctgtaagatttgtcaaggctgactactcacttctcctttaaattctttcctaccttggtcctgcctctttgagtatattagtaggttttttttatttgtttgagacagggtctcactctgtcacccaggctgcagtgcaatggcgcgatctcagctcactgcaacctccacctccgggttcaagcgattcttgtgcctcggcctccctagtagctgggattacaggcgcacaccaccacacacagctaattttttttttttttttttttttttttttttagacggagccttgctctgttgccagactggagtgcagtggcacgatctcggctcactgcaacctctgcctcccgggttcaagccattctgcctcagcctcccaagtagctgggagtacaggcgtctgccaccatgcctaatttttttctatttttaggagagaccggttttcaccacgttggccaggatggtctcgatatcctgatctcgtgatccgcctgcctctgcctcccaaagtgctgggattacaggtgtgacccactgcgcacagccccagctaattttcatatttttagtagagacagggttttgccatgttgcccaggctggtcttgaactcctaacctcgggtgatccacccaccttggcctcccaaagtgttaggattacaggcatgagccactgcgcccggctgagtgtactagtagttaagagaataaactagatctagaatcagagctggattcaattcctgtccttcacatttactagctgtgcaaccttgggcacataacttaatgtctttgagccttagttttttcatctgtaaaacagggataataacagcaccccatagagttgtgacgaggattgagataatctaagtaaagcacagtccctaggacatagtaaatgattcatatatccgaactactgttataattattccttcttactctcctcttctagcatttcttccaattattacagtccttcaagattccatttcttaacagtctccaatcccatctattctctgcctttactatatgttgaccattccaaagttcttatctctagctcagacatctactacagcactgtgatgctttatgcaactaactgtttacatatctgtcccctgctactagattgtgagctccttgagggaaaggaacatgatttatttgtccttttcccccagcacctagagtagtgcttggtgcatgatagtaggccttcaataaattttttctaaatgaatga

SEQ ID NO: 11 - DNA, 160820 bp, Homo sapiens
aagctttgaaactccacaaatgaaaacactcagcccttctcttcagagagttcactatctctggtggaaaggcagacactgtggaagggtagtacagtgataaatcatgtggggattcctaaacagtaatgacagggagagatttgctcagagtgagagatttgatcctgggattcagagcaggaaataaagaggatcctgaagggagcccatagaattggaagaaaatgaagcagtcaaagagctagagatccctctgaaggatgacgaagtgagggcatcatatggctacccaaaatggtagaggattgtgatccaagagtggataagggcattcaccattgctgagctataatgatcctaggtgagtgctgcccatcactgaggcacacagaagactgactaaagtgaaataaggattgaaagtggtaacattgaggagatccatgacttgtagagcttccctctatcacatgcctcataggtcatctgttctttccttaacattacttccatctcacaaagccatccattccattttagcagcccagtttgtttacttccctatactgcagagaagtcttcttccctttaatttctatctgttgataccatttcttccactattagctatgtagaaaataaaattgaagggatcacgtctcctcatttattcaccaaatatttgcacaccagttatatgccacatattgctattaatagttcctggaactatagaagtatatgaggtgatcatttctaacttatggtattgtctagactggaggaagccagaaagtcaaggagtggagtgagagttaacagagggaagtaggctatcatgggacctgaaaacaggaaagtctaaagcgtgtatgtatacatgataggggaggggagtggacagaaaagggcccccagagagcacgccacctgagctgcatttggagcgcacatgtataggactatacctggagagagtgcaggcaaatggtgcatcaaacgcagcaagtccaggttgagttgtgatgcatttgaggagctgaagtaagtcaacatgaagaagatgaggctgaaaagtaggcagaggttttgttaactattttaggagcttgagccttattttacgatgatttatttggaagcgacttaaggagaacagaaatgatcacagttaggtttttaagagaagaatgaattggagcgtaggaggaaattgtatttataaagactggtaagaaggcttttgaggtaaatcagctgagaaatgatggtagcttgtactgtgcaagggtggagggagctaatggatatatttgaaagctacttagcaggtagactctgtaggacttggtgatttataggattggtgttggggagggtaggagaggaataaatcaagaatggaatctgggtttcgcatttggtcacgtgatagcagaagaaacaaggtcaggggaaagataagtctgctttagacatatttaattcaagatgattactgactttcaagctttcaagctgatatttccctgttctctaaatttaaaaacaagttatttatatatttattgacatcaattgacaattgccttttttgtgctgcttctgcactctgtgtagaccttataatacttctaacgctcctgggttataaactccttgaaaatagaggtaacttcttatatccctggagaatagtgccaggcatatagtgttaagcaaatgtttgaattaatgccactttattttgcttccttgtttatatgtcagtctccttgaagactgattctttaagcgtaaggacctcatggtgatctttgcatttccagtgccttctacagagcctgacccacagttagggttcagtaaacattgtttctattgttatttcatcgtcatcatcatctactatttaagtaccctcatatttttgttaatttttagtcctgggtgttaaatagtaataatctaaggttttgggttttttttagaatgtgatgtgagaatggggctcaatttcaattttagacatttaggtttaactttcataagccaagacttttaatgtaatgcaggctgacttagacattatttactgtgcttcatttcagatatatctacataatgggaatacaagaaagaaatgagaaattgttttatagaatactgcaagatgacattgagagtttaatgccaattgtatatacaccgacggttggtcttgcctgctcccagtatggacacatctttagaagacctaagtaaggcttgtttaaaaaaaagcttgtaaatgattattgaataaggaaaatatcattccataacacccattacatttctattttatgtttgttagccaaatcacatttcccacctcagaaaaacgtaattttgattaaaagagattaacaaaatcccaacatattcataacttttatctttgtaaaaatagcataattcatttctaatcttctttaaattattgtgattgttagaggaattacatacatacttctggaacctgctcccccaccaaaaaaagtcttaattctggtgggagattatccagaattatcattaaaatttttgtcaataaagtcaaattaagagatttttttttctcattttttaatcagttttaatttgtttttgtttttgagacagagtctcactttgtcacccaggctggagtggagtgcagcagtatgatcttggctcactgcaacctctgcctcccaggttcaagttattcttgtgcctcaacctccctagtagctggaattacaggtgcacgccaccatgcctgctaatttttgtatttttagtagagatgggatttcaccatgttggctgggctggtcttgaactcctgactccaagtgatcagcctgcctcagcctcccaaagtgctgggatttacaggcgtgagccactgcatctggcctgttctcctttttttaatgaattttcattccaaatagttgtagcacctacaaacattataagtgggaagagtactgaaatggcaaggactgactcaagttcttgaatgagtcgcgtgatccccatgaatgtgtttcctcatgtgtaaaatgggaatagcaggacctatcaaagagctattggagaaaccaatgtgacagttctttggaaaattatcagcaatattatatacacacacacacacacacacacacacacacacacacacacacatatgctgttttcacttaatctgagttttcttattcctctaatccattattatttttctcaatccttataatattttccccatgcccaattaacacattcttccacgtgtagaaattcagtctcctgtcgccttgtctagtggctttcaaactttaatgtgtgtaagaaatacctgtgggacttactcaaaatgttgatctctgccaactttcctctcctccccatccccaagatttctgatgaaaaagaaaaaaggtctggaggtccggattttagtgagcaccctcagtgattgtgttgcaggtgttccctggaagacactgagaaacagactgttctaacctagatgctgccaacaattactgtaactaaaacatttctgtgacataaccatgctgttcagctattttatagtttcttattagaatgattaaaagatagagagaaacttagaaatactgatgcctgagccccacccccagagattcagattcagttagtctagacttaggagtttcacaaaagagcctggtgtaattctgatgtatacccagagttgagaactgacttgaaacatgaagagcatggcttatgtgtgagggcaaatactgtatattgtttatgcaatgcattgtgctatgggttttttttgttgttcattttgtttttgtagatggtcattaaatcttgattggttggttgattgatctaaactttaagctaattaaatcagaatctttggaggtgggaccctggcattttaaagcttatcagatgattccattatatagccagattgagaaattgctgaactaaactgatttgaactgtaatagtagtgccaaatttaagataccaatgagaaagttaaacctaagatcagtttgacagcaatgaggatccactggccctcatgtctgcctgacctgtgttctagaacctgcgtttcttctttttttcctccttctctcccttccttctttgctttctcttttgaaatctggattgattatctgaattaggtaacaatatactgtgtctaaaatgactttttgttagccattccacaatttatacatacttcaaaacatgttgtacatgataaatacagttgacccttgaacaacacaggtgtgaaggtccatttatactcagattttcctgtgcttctgccacccctgagacaggaagaccaacccctcctcctcctcctcctcctcctcctctttatgattttgttaataacattttcttttttctagattactttattgtaagaatacagtatagaattcatatggcatacaaaatagtgttagtcagccaggcacagtgactcatacctttaatcctaacactttgggaggctgaagcgggtggatcacttgaggtcaggagttcgagaccagcctggccaacatggcgaaaccctatctctactaaaaatacaaaaactagccaggcatggtggcgggcatgtaaaatcccatctactctggaggctgaggcaggagaattgcttgaaccctcggtggaggggcagaggttgcagcgagccgagatcgtaccacttcactgcagcatgggtgaaagagcaaaactccaagtcaaaaaagaaaaaaaattgttagtcaatctgtgtgttactggtaaggcttctggtcagtaataggccattagtagttaagtttttggaaaatcatatgtaaatttttgatttgattttctaacacccacattgttcaagggtcaactgtatatccaatttttgccaattaaaaaataatattaaataagtaaaagtaacttcactttttcctgatgcttcaggtgtctcatcttttgtgtgattttactgtaattttcttctctcccttcctgctccctcaaatttcaaattttcagtttcagtaagtcttaacaatagtttagttggccttgtactgctctcctgcattggtggcttgctttagattttttttttttttcctggtggtgtattgagtttatttgaacatgagatgtggttacatttcttcttgggtaaaatgactgtatcatttaacaataatctttgttgcatctgctatgaacagtaattacagtttgaagtacttgaaaatgtttgaaaataaaccagtgtgacttagctaaatctgcttggaaattataccatgtcttgatattttattaaaatatcaaaatatttcaattatgaacaaaaacttagaaacaaagctgttgtgaaatgcaaaggtgtttttgttctgttgcaggggattatttatttcgatctcagacagaggtcatgttagatcaattgtggataactggccagaaaatcatgttaaggtactaatagcacaaccctccttttcacaatgttttctcttttcttgtaaattacctctaaatctccaagaacagtttttcattgttgctctcatttattttgcacttatatacatgcagatttagtgctttgcagctgaagtgatgataatagtagtagttataaaatgggctactggtataaagtttgactctgagaaagaaattagagctagaatacaaggtgagccctctcggtatcagcaccactggtgtctcctgccttctcaatctccttttctatttcactaatattattctaggtaaagaaaatacattaaaatgccataaaaacttttgtttatgaatggtgttagagaagtttggttatgcctttttttcttttaaatctaagatttagaaccttagcaaatataaaaatgttaaatatagcaaatataagccctggcctatttagttatctttcataaaataaaatgtaataacttatttcaagatctttgggtaggcttttgtaaattttattgtaggcaataatcttacctgcctttatactcctttccaaaataaacattgaatgatcgttggtttgaatactctagcaaaaatttggtcaaataattaaactcacagtatcatcttaagaccttccttataagtaggtattttttttgttctagacctttttctttttcacagttgctaaggttttttttgtttggcctaggttattgtgttggagtaccatgctgtttatttctaaactcttatttttctcttatggtaatctctccatcagaatcttgttcatctctgccatatttaatctttctgaagatatttaagttggtcctctagtcagaagaattctattcctaaaccgaagtcagagggaaatcaaatctagttaatgtctcataatactcagaagtcctagaattttaagtatgctttgttggtttacattggaaattagccaagaaacaattttatttttaagagcaaagagtaaatatatatgaagtgaatcaatcttttaaaaaatgcttttctttagtgccccatttttgacaacttttaatttgcatttttttgtgattaaggctgttgtagtgactgatggagagagaattctgggtcttggagatctgggtgtctatggaatgggaattccagtaggaaaactttgtttgtatacagcttgtgcaggaatacggcctgatagatgcctgccagtgtgtattgatgtgggaactgataatatcgtgagtaacatcattttccccctttatcttcctcctgtattttttaaaatgtgtacaatattccttttttgaaaatgataatttaagaagggaaagttttatgattagatttttttttcttaaactccacttttaatatttatataaataatagtaaattaagtctattaaaagtttcttggtccgggcatggtggctcatacctgtaatcccaggacattggaaggccgaggcaggcagatcaccaaaagtcaggagttcgagaccagcctggccaacatggtgaaacccagactctactaaaaatacaaaaaaaattagctgggcgtggtggcacatgcttgtaatcccagctacaaggctgaggcaagagaattgcttgaatgcaaaagacagaggttgcagtgagccgagatcacaccattgcactctagcctgggtgacaagagtgagactgtctcaaaaaagaaaaaataaagtttcttgtagggcaatacatttaaaaaattgtattagtaattttttattttgcaatttttattgtatgtgtttaaactgattatataaattattttatttttacatttggtttattttgtaggcactcttaaaagacccattttacatgggcttgtaccagaaacgagatcgcacacaacagtatgatgacctgattgatgagtttatgaaagctattactgacaggtattttttaaaagtttgagtatatgaaagcacctttaatggggtgggtggggtaagaaccaaagttttgttttgttttcctttatttctttcctgtgtagataagcaggaggcgattaaatttttgagaactttgttctgcctggctgtttctgcctgattagatgtgccgatatgaggtggtacccatggtctgccttgctttcttgagttacctgacattttgagggaagtctgccctcactgcttccatcaaacgcttactgctcagtacctttttcagccttgaccttcaggctcacgcccaccattccactgaagctcttgtgcagcttttgtattttaagttctctgaccattgggtcctcccacttctctacctctttgcaccgtcaactcaggttttcccacttctatgtccttgaaactctctcttctcttgactgctaaacagcttcctcctaacttggtctttctcccacctttctcttttttttttttttttgtcatcttcacaggttcttgctgtctcttactaaatgtggataactacctagtcctcttctctttcagccatgtcaactatgacctttatgcatgttactactaaacccataaaaacccatctgtagttccactgctcttgtgaggcctgcatttctaatagtcagaatcttccatctggatattctgttatgagtgcatattcatatcccacactgaactcctttcctttccaaacaacctatcttctgtattcccagcttctattattggcagtaacattcatcctgttgccaaaactttgatcttagtgttatctttgactcttctgccttctccgtcagtctcccgtgcagtcagatattcctcaaattcagtgggtactaccacttaaatgtctcctgttttccattgccgcaatcttgctctctccttatctctcttctggagttttctaattcttcctccagtttctctcctctccagttcgtctccaccttaataccagattaattgttttgaaacgtgtgcttcattatgtcattcttttgcttgaaatctctgattggtttcctattgccataggataaagtcaaactcttttaccttaatgatctaaccctggcctacctttaaaattgctggcacgtagaagatatttaaacattaattccttttcagagtcaaagtcaacaagtctaaagctgaactttacatcttcccagaaattgccatctctccttcttcctctcactttcctatcttggacaaccaaatagtaccttcttagttaccccattaccttcacattgtaacagcttcttcctcatttcccagttgatccttatcaatttctattcatcctaatagttcatagttactccttttgcttcctgcatcttctgcttcagatctcttgtcttcgtatcatagtagcctcctagttgcttctgccactcccgtctccccacaccaatatgagctacgtatcactggcaggtttatccttcctaaagggagtcatatgtgaatattttcctttctctgcagccttcactgtttctacatgggatgcagaagaaagtccctcttctctaatttagcattcgagatcctcccttatttggttccaacctgcattaaccaatttctcccttatctcttaatgtaaaccatgaaatatatagccagactgttgaaaattcagggtcaccctaataacagcctgcttttcttcctagctctttactttttgttctttcagggcccacctccttttcaagccttcccttactacttgagctcacctagacgattaacatcttctttttctgaatgtcagtgaactcaaatagcaattatttttcaatttcttatttaatatatactttcttgtgttgctgtttaactattaatgtaatgagaatatacatatcaaatatatattttttgaggttcagagtcaaaggaagtgtcctcctggacacttgaaaatagtttacatagattgatatcccatgggtttatcattgtgccacattctttttaaacacctcatactttttttattgaataatttctacattttggatctagtctttcacaggctctgaaatttttcagatggccttaattgaactaacataatacattatttttgaatgctatcatagggaatattaggtggaaagctgtttaatagtgttattttcaacacaactattgtgggttttgctgtttttagatatggccggaacacactcattcagttcgaagactttggaaatcataatgcattcaggttcttgagaaagtaccgagaaaaatattgtactttcaatgatgatattcaaggtaaagcaaaaaaactttagggttttgattcctactttttaaacatttttaatgtgcccattttttatttgtaaaaatctttgtttttcttacagggacagctgcagtagctctagcaggtcttcttgcagcacaaaaagttattagtaaaccaatctccgaacacaaaatcttattccttggagcaggagaggtaagttttgaaggctttttgaaacttaagcctatcctctcttatagaattagaaaatgggcagaatattgatgtttatgaaagagcatagtgagcctgtaattttgttgaggtagaggatatgaaatcaagagttctgctgtaaaacatgtaatttaaaatatgtttcgagagaatatcacgaagaatttttgtttgatttgtaagggaaaaataaaccaaatatttcttatggcatataatcttcatatataaagtaattcaagcattgcatcgtactctagtatatattaaaatttatgttttgttgaacaggctgctcttggaattgcaaatcttatagttatgtctatggtagaaaatggcctgtcagaacaagaggcacaaaagaaaatctggatgtttgacaagtatggtttattagttaaggtaaggtatttaaaatttggagaagcaaaagagtgtattatatttttagttggatttttaaaatattattccttaaaatcttgtttctcattggagtctccaaattataccaattgggaccttccactctcttttcaacagatgtccctagtcttgttgtcttttacaaagacttctgcttcatattgaattaataatctctatgttggcatcagacttactctttcttgctttgttgtcttgctcttaagagatcaaatggccattgtacaagtatgatcgtgtttgacactcctaaaactaggtttttagtaggaactgagaacttcctaattaaattgcagtattgcagtagttttgatatttgagcagaaattcttttaattttattattatttattttttttgagatgaagtctctctctgtcacccaggctggagtgcagtggtgcgatgtcacctcgctgcaacttctgcctcctgggttcaagcaattctcctgcctgagcctcccgaggctaccgtgcctggccgtgagcagaaattcttaaccctttggagatcataatcccctgaagaaatctaataaaaatctgtggaccctatccccaggaaaaaagcatgtgctcctgaaaccaatttatggataataaagagcttatctcccagattaacttagtacctttgggcctgactacctttgttagcattgattaccattttcactagcttaagaatgtcatatatcttctgtgtaacacattgaatataagtaaactgttccatagttaaaccaatccagtacacaatgctgttatatttttgtatgtacacattaaaatataatggtatagctgtcgcttggcatttatgtctgtggagcaagctatctaaatgtactttgttccagttctaaaatcttttcttgttaattagaaccagtattctattagtacaaaaaataaaatgaaaagttaaagtatgtgaatgaaaaatcttgagtgctcaaactacatgtaatttaaaatgtaatagtagttatataccagacattgttataagactttacatgtattatctcctttaatcatctcaaaaaatcctgtgaagttttacaaatgaagaaacagtttaaaaggtcgagggagttttccaaagtcatcagcttataagtgacggaggtaggattcaaaaccaagtatcctgactgcgaagcctgtgctctgaataattaaactgtgctgcctcccaaagaggctgtaactaccatatttactagtatgtaaggcacaaggataaaacatcacatatttagaaggctattgggggatgtatgttttgactagtacacagttagtttggtacttctttttgtaatgttggttttcatcaaatatgttgtgattctttagcatattggtaggtcaggtctaacacagtattggtagctacaatgtgtttacttagcacaaagtgagaaccctgtccatctccatattcatcatcagattatatatttcttttccagtgtgcaggtagcttggcctatgggcattaggcttccagtgtctcctggtgatcctaaacactgcccttcattttgaaactttgaaaacagtggcttcttatgtcactgtttgctcagcctggttttctcagccgattgatgatagtgtcctgctttactaacccctgcagtttcttatctggagttatcttggagttctgatggaaatacactttttcagaagtcttcttttttaccaaaataagaatatgagttctcagttggtttttgcattcagtatgtttttgtctgccttaaatctttgagaaattcttcattgttctagtctgtcagtggtatctcttctggctttgtggcattactacaaatttaacttttatggtttttgacctgggatttggaaaggaaagcatgtttcttcattcagccatctttaaccagaattccctgttcctcttgtttctgaactcttggtagtgcaagtccatggtgtctgtctgcaattctgaaatcctaaaggctttgaaattccaaaattttttccaaaatttatttttgtgaccaatctgattgccttgaatttacctagaagcgaaacctgactcaaactaataagaagctctttgtaatcttaaccttttgtacttgatgtgactattcataagtttgttcagttgtggagtatctgttgggagggagaatatgtaatatttgatatacgccatattgtatttctaaaatatgaaaaattctcagccaggagtggtggctcatgcatgtggtggctcagcttcccactttgggaagctgaggtggacggatcacttgagcccaggagtttgagaccagcctgggcaagatggcaaaaccccatctctacaaaaaaatcatccgggcatggtggtgtgtgcccatagttccagctactctggaggctgaggtgggaggatcacctgagcctggggaggtagaggctgccactgcactcaagtctgggcgacagagtgataccccatttcaaaataaataaatcaaattaaattaaatatgaaaatttcttaattccaaaactcatctaccccagataaaggactgtaggcttttgtgccacattggacttaggaagacctcatagtgtaaatgcatttttgagaggaactagaaagtttctaggaataatggtagatttgatttttgttttatatttgagtttatggacatgatgaagatagagttggaaggtatgggttgaagaggaaagtaaatgaaaatgaaaagacatttctattgtagaaacaatgtgtaactcataatgatgtctttttatttcatctttaatatgcattgactaaaaaaatactgtattttatctcaaaatttagggacggaaagcaaaaatagatagttatcaggaaccatttactcactcagccccagagagcatacctgatacttttgaagatgcagtgaatatactgaagccttcaactataattggtaggtaaagtttttctgataaataattttactccctaactgtatgttgccagtcatcattaccatgtaggattactaaaaatgaattggcagttttacctagctttcagcatgtacaatgttttctgtgataactttttggttaccatgcatgaaattcagttaccagatgttgctttatacttttaggtcctagacactgtgtagtcgatcatgatttgcttttagagttggtatgactgttggactcaaaacatgaaaaaaaccaaagccatttgcagattttaccaggaaaattctatgcagactcaaagttttcgtggacaacaaagctgaaaactttgagtgtgttttgaatcaggcattgcatagatgccatcagactatgtcatcatggcattacattctcagcagaaaatgtaaaagtgtttaaaagaggagctatttaatttgctgtatagctgtaagtttttttgttttcttgttttttgtttttttttttgagacagagtctcactctgtcactcaagctggagttggctcactgcaacttccacctcccgggttcaagcaattctcttgccccagcctcccaagtagctgggattacaggtacccaccaccacgcccagctaatttttgtaattttagtagagatggggtttcaccatgttgaccaggctggtcttgaactcctgacctcaggtgatccacctgcctcggcgggtgagactccatctcaaaaaataaataaataaaaataaacaaccccccattttccccactccccaccccctaacaaccaccattctactttttgtctctatgaatttaactacctcatataaatggaatgacatggtatttttctctttgtgactggctaattttatttagcataatgtcaagtttcatccatgtggtagcaagttttatcttcccaattagagtgatgaagatagtcatatactctttttaaaaattggttgggcatggtggctcacacctgtaattccagcactctgggaggccaaggcaggcggatcacctgaggtcaggagtttgagactagcctggccaacatggcaaaaccccatctctactaaaaatacaaaaattagccgggcgtggtggcacacacctttaatcccagctacctgggaaggtgaggcacgagaatcacttgaacccaggagggagaggttgcagtgagctgagattgtgccactacactccagtctgggcgacagagcgagactctgtctcaaaaaacaaaaagttaaaagaataaaatttcccataatttactatgtgtatagtagacaataaatatttaagtgagaactttcagcatcttactgttttttcttttcagatttgagattgtgttctcatagattttgcattgctgagatagtgctatctttgtaatgagatattacctgtgtttttattattgtaggcctattgtagaaatgctattgataagcattgcttttatacctataatgaagttgctgtttttcccccttacttattacaggagttgcaggtgctggccgtcttttcactcctgatgtaatcagagccatggcctctatcaatgaaaggcctgtaatatttgcattaagtaatcctacagcacaggcagagtgcacggctgaagaagcatatacacttacagaggtattaataatcacatgaattgatatgtatattattttccctccactagcttattagttatacattcttacaccattgttctaatggtttccctagagattacagcatgcatctatgggtgatcaaagtctgatattaattattgcttataccaattatgggaaacaggtactttataactccactgtaatgccctcacactgtttgcactattgttgtgaattttaattttctatgtattttaaactcaaaatacattattgttatattttacaaaaattattcagatttacctacactttaatttatttatcactattcttcctgcaagtgcttctacctaggatcattttccttctaccagaagaattcctttatttaagtgtaggtctaatgaattctcttggtaatttattttgccttcattttgaaggatattttcactctgcatagacgtaaaagttggtaaatacttgagcattttgaagatatcattttactgttttctgacttttgttttctttttgatgatatagcattgtcttaggtttttaacagtttgactatggcggacatatgcgtggttttctttgtatttattccacatggggattatactgctcctgaatctatggcttgatgtctgtttttggtttttgttttttctgttttgaaaaaatatcagccagtatctctactttggccacattgtctctctcatcttatgggactctaattatatggttagagatatatctcatttatcttttacactgttttctatatttactatctctcttgctttctgtgtttcaatctggtgatttcctttggccctattttccagtttgcagattctctgttcagctgtgctcatctgttgttaggttcttaattttagttgctgtattttttcatttgtagaatttgtgttttatctgtatagtaatttattaatttagtaacagacttaaaatcatgtactgtagaaataatcaatctctaaatactgctttcttgtactcacatttcatgaaactttttactctcttcaaatgcatcttcaccatcagtgtttgtcttttctaaggctgttttttttgagtcatctggcgctgtggagaacaaatttttatttacatccgaactgtttaagattcactacttttagatctttgacactaccacgggattatagcccaattacaaatatctgcctataaatcacttgacatttgggtttttttcctaccattctgtaaggatgtagttgtaatctccacaattactttctatattgttgtggtaagtgatctaagtggctctaggaagtgatttttaaaggcttgtttacaatgatgtctagcagctataattgctagactacatccttgagagtaagtaataaatctgatacatttttttaatcttcactcctttaaaacaacgttttttatagtagaaaagtattacagtgtatctctcaaaagctaaggattcttttaaaaatataaccacagggccgggcacggtggctcacgcctgtaatcccagcactttgggaggctgaggtgggcagatcacgaggtcaggagatcgagaccatcctggctaacatagtgaaaccccgtctctactaaaaatacaaaaaaaattagccagatgtggtggcgggtgcctttagtcccagctgctggggaggctgaggcaggagaatggtgtgaacccacgaggcggagcttgcattgagccgagatcgcaccactgcactccagcctgggtgacagagcaagactccatctcaaaaaaaaccccaaaaaaccatatatatatatatatatatatatatatatatatatatacacaccacagtactgttatacctcataatttgaacaataattatatcttgtcatttaattttttttttttttttttttgagacagggtctctcttggttgcccaggctggagtgtagtggcacagtcatagctcactgcagactccaattcctggctcaagtaatcctcttgcctcagcttcctcagtagctgggactacaggcaaataccaccacacccagctaattttttaatttttatttttgtagagacaaggtcttgctttgttggccaggctggtctcaaattgctgacctcaagtgatcccctgcctcagcctcccaaagtgctgggattacagacatgagccactgtgccccacctaatttcttgaatatgtgaattgcaattaaaattttctgatggtaacaaatatctcactcatttttattatctatcttttgttctgtcttggttatcaggtttgtttgtaaggctaatttgtccttttttttttctttttttttttgagatgaagcgtcactgtgttgcccaggctagagtgcagtggcgtcatctcacctcactgcaaactctgcctcccaggttcacatcattctcctgcctcagcctcccgagtagctgggtgcccgccaccatgcccggctaatttttttgtatttttagtagagatggggttttaccatgttagccaggatggtctcgatttcctgaccttgtgatccgcccgcctcggcctcccaaagtgctgggattacaggcatgagccactgcgcccggactgtttttgtttttcttaattgagtgatggatagtgtagaaaaagaactatagcaataatttaaggctgtggataaagttatttttggagaaagggactttactttttcaagtagatcgccataatccagtcaggatgtggtccacatgaggcctggggtatttccagtttgccctttctcctgatatccacccctttgggtatgaatcatcaaaagtcctgaggtatttatcagcacctctcatccttaacggtccctgaacatccattttcctctctgtcatcatgagactttgggtggctttgctgttcagggtctcagtcacagcttttgatttggaaatcagcagtcatcttgaggggaagagcttcaaatgctaggctcatatatcttgcttccctcttcttttgaatcttggaaacctctcttccccaacaccaaactctcactatcttgttaggtctctgcttgcttacaaaaatttttaaaaatgtattttatctggttttttaaattgtaaccagaggaaaatttggtatgaaacaacccagaaaatcattgccaaagcagaactctcagaacttcctgaacttaatattcatacttttgatatatttggcattcttttttttttttttcccattgttaaacactgtgtaggccaggcacagtggttcatgcctgtaatcccagcactttggaatgccaaggtgggcagaccacttgaggccaggagttcaagatctgcctggccaactaaaaatacaggtgaaaccctgtctctactaaaaatacaaaaaaattagccaggtgtggtggctcacacctgtagtcccagctactcaggaggctgaggctggagaatagtctgaacccaggaggcagaggctgtgtgagccaagatcgtgccactgcactccagcctgggcaacagagcaagactgtctcaaaaaaaaaaaaaaaaaccaacaaaaaaacaacctttatgttgacacatgtattctctcaaaattcctttttgacctttttgaccactccgttagtcaaaataaattctcatgactgttagtttccaattgatataataattattgaaatctcttcttctaaatcaatcacaaaatcaccatacagatatttaaaaattagtctctttagtatactgtcttatctttttattacttttagcttgattgcctgtcctcttcaccaggttttactacttaaaactaatggttattgttccccaaattaaatcttagtcttctacaatgactcttgggtaaatatattaaatgcatcatggatcgttgacatttccaaaatataaaaaatttaagtgtttcgagtagtagtggtatatcaccagaagactgctcatttaagaattttgttttttgtataaatattattgtaataaatgtactttattggaataaataaaaattccccaaggagactagtttgatatactatatttcatcagttttaagatcaaggattgcttgagcccatgagtttgagaccagcctaggcaacgtagcgaaaccctgtctgtataaaaaatttaaaaattagccaagcatggtggcgcacacctgtggtcttagctacttgggaggctgaggtgggaggattgcttgagcccaggaggttgaggctgcagtgagctgtgatcgtgccactgaactccagcctgggcaacagaatgagaccccgtctcaaaaataaataaataaaaagagcatggtgtcatagtttacttttacataaattctttcttagtgttacatgaaataatggcatagaattttgactagtcgtcacctgttaaatttttagtcccattttgttttcaccagggaggtgttactccaacaccgtttgctgctcagcgagaaaaatactctaaaaaaaaatcttcatagttgaattgccagctgcttacatagaccaagttggacttcagaataagaatatactattatcattaaaacctggccacgtttaagccatggattaattattgagttaaatgggcagggaggcagggatggtgacctggagaacgtgaactgctatagaatcttgtcattattgaagagattcccaagatctttctaaatttccaaacttactgataccatgagaacattttttccatgatgtgctatattgtataatctaccttataagactattaaaattaatggtgccagaaaaataattatgtacttattgtgataacatgtatgacattaaccatgaactaaccttaatcatcaaagaaacaaaatttttagtcacaagtaatgtttagaacagatagataattgtaatagctatccatagaataggtagaaaatgatataacaatatagagttgcaagtctaagatagtcagctgtgccctactagcatagttagcttgcttctactcttaaaccttgtatcattttgaaatggaaagtatgtcttgtaaaagtagtggttactctgcattattgaccttcagattacctggagtcaaattcttgaatgttaaatccactaaagccaagggtctacaatgctataaagaataataacacaattaattctcttagaaatactgaatatgccagtaacatttattatatgccattatagagcatagtatcaaaattggatagatgtgacaaatttggagaagtattcttctttaacaaggcatcaggccatttgttttcctggagtgatactgtggtcatgccacatgcctgtgttataaactgcctactgctgggtattatagcatcattgaaaacctgtggctatggagttacaaaaaaatctagattaagatttaactactacagttttgatgtgtgacttttgacaaagtatttgaaaatattaaagccttagttttctgattttttaaaattagtgaaatggagatgatgatgaagttttcatgatggcaaaattaactgagttaaacacatataaagcacttggtaattagttttagcggatatatagtaaatgacagccatttgttttggtatttccccttcattcatcggtgtttatattggtctttataatatggaatggtatttattggccgtctacattttaaatttcttttttttttctttttcttttttttttgagatggagtctcgctctgttgcccaggctggagtgcagtggcgtgctatcggctcactgcaacctctgcctcctgggttcaagtgattctcccgcctcaggctcctgagtagctgagattacaggcatgggccaacacacccagctaattttttgtattttttgtattttttgtagagataggggtttcactctgttccaggccatctcaaactcctggcctccagtgatctgcccaccttggcctcccaaagtgctgggactgcaggtgtaagcttctgtgcctggccttaaatttcttaaaaataagtgtctggtttttaaatttttagtaataaatgatttttaactttattatttatttattgaatgtatactacacatgaaacaaacctcattctaacaaaaggattgtaacgaaaagattgttatatagtatattatgccttgcttccaagtaatatattggtctattttacttcaggacttgattttgtatgaattcacctcaattttctcatccacagaaaataacaaaattgaagttatttcattttattaacagggcaggtgtttgtttgccagtggcagtccatttgggccagtgaaacttacagatgggcgagtctttacaccaggtcaaggaaacaatgtttatatttttccaggtaaatgccaccattatttatgttatagagcaatagttaattatgtaaaaatacttaatggaattctttggaatgggagactgaactgagcaacagtattacagaattttggtataaatgtacaaggaaactcaaggaattcatcaaattcagcatgctccactttctctgaaaatttattcatattgttaattaaatttgtttttattatagaaataatatattgcatgatttgtaaaaatgcagaggaacagaatggcacaaaattatgtaaccctttctatctccccttggtgtacctccttaatcatacttctcagaaccattgtcaataatttgctgggagttcttctgatggttaccatcgtgactgatagatttatttcccaggttcaagcagttcccctgcctcagcctcccgagtatctgggactacaggcatgcaccaccacactcagctaatttttgtatttttagtagagatggggtttcaccatgttgaccaggctggtctcgaactcctgacctcaggtgttctgcccatcccaaagtgctgggattacaggtgtgagccaccacgcccagccaggtgttcttattttgtaagatacacccagtatactggtatcacaccaaaggaaattaataataattgcttaatatcgtttatcattacctcagttcaacaacttatttttattcccaataccttttttattctagaattgctctttctaaatagctacttttaaagcaaaaatggttacagtactcattgagctttttctggagaattattaggattcctttcaatgtttctgcctttgtgctgtattttccataaatttctagtgatcctcagttgtctctttcttttaagcaagactgtgttgagtaaaacaggaattttgtatgattttcttttgcacttgtgtcttttttcttctggtaggtctttccctgactagctgacagcaggctctaattaagatatgacaagtttatataggctggcatcaggcaagcatgtataactgttgtcaaagtaaagagggtatttagtctgtgaatatcctggtacttttctatatttttctccttttttttgcccctcatgttttcctatatgtctcttgagacctaacttctataatagaaactgtcctgtcatccataatctctttctagaacttgataatgttcaaaattaatgtgttctattcagtaacatttctatggcctaaaagacatgagggcaggaaaggaaatacttttctgctgattttaacaaagctatttttttaaactttttttttttagttccaggggtacatatgaaggtttgttatataggtaaattgtgtgttgcagggggtttcatgtgtagattatttcatcacccgggtaataagcatgctacccgataggtagttgtttgatccttaccctcttcccgccctctacccttaagtaggccccagtgtctgttgttcccttctttgtgtccatgagttcttatcacttagctccacttgcaagtgagaacatacggcatttggttttctgttcctgtgttagttcacttaggataatagcctccagctccatgcatgttactgcaaaggacgtgatctcattcatttttttggctgcatagtatttttttttatttatacacatggtgtatatgtgccacatttactttatccagtttaccattgatgggcatttagattaattctatgtctttactattgtgaatagtgctgcagtgaacatacacatgcatgtgtctttatggtagaatgatttatattcctttgagtatatacccaataataggattgctgggtcgaatggttgttctaaattcagcaaaaccatattttatatcatatctgagtattaaggaatttagcagttgattatttttatataacactttaaaatcctaacttaaataacagctatggataccataaatatagacattaaaaatgacctggtcaggcatggtgctctcgcctgtaatcccaacattttgggaggccgaggcaggaggattgcttgaggccagaagtttgacaccagcctgggcaacatagtgagaccttgtttcttccaaaaattaaaaaaattaaccaggtgtagtggtgcacacccctattcccagctagtcaggaggctgagatggaaggatcgcatgagcctgggaggtccaggctgcagtgagccatcatcatgccagtgcactccagcctgggcaacaaagtgagactgtctcaaaaaaataaaataaaatgacctggcatttgaggcagaaatgagcctaaaagcaggaggattggctgaaagtctgtttataaagcaacttaaaaaaaaaactgttaatatttgaatgacctagttgagcaactataacaaccggatgaaaattttttttaagactttaaaagggtcaaagggataagatattgactctaatggaatattggagaattctggaccaaggttagggagggaacaaatgcacagaacaagcttttgaagccagttttacagtggaaatatagaccaggaagaaagtggctaagaggtacagctgtgcttttcatggaaagtggacaagatcggcaccatgtccgagtctggcactacctcccactctggactgaaaccctaaagtgctgtaccttggattgggggtatagtttgcagcagcaatgggtgatttagaaaacctcaagcctctgttcgggactgccagtgcccacaagtgcccagcggaagcaaacaaaaatttctctgaaataagataatggcatcctagtcctcaaattatttttataaattttcaagtacaacctaagtagaaaaataaaaaaaaagataatgaggcacataaagagacataacaacagaagccaaaaccagcaaaaacaagaaaaacagacacactgaaaccctggatataccgtaaatgctatgaaacaaatatgcttattatgtttatagagataaaagccaatcttgaaaacttaagacaagtaccactaaattctagaattgaaaaatgtagtagtctataagaactgagtgagctgggtgtagtggctcatgcctgtaatcccagcactttgcgagaccaaggtggaagaattgcttgagcccaggagtttgagaccagccctggcaacgtagtgagacccccatctctataaaattaaaaaaaaaaaaaaaattagccaggcatagtggcatatgcctgtagtcctagctattcaggaggctgagatgggaagatcactcgagcttgggaggtcaaggctggagtgagtcatgattgggccactgcactccagcctgggtgacagagcaagaccctgtctcaaaaaaaaaaaaaaaaaaaaagagtgaatgtggcttatggcagattagaccagagagaattaatcaactggaaaatatctcagaagaaacaatccagaatgcagcacagagagaccaaaaagaaaaaaaaataggtaagggacatacatttcattgatagatctttaattgaagtcctagaagaaatgagaatgaagcagaggcaacatgtgccggcctcatggctgagttttttttttagaactggtgattgacaatcaatattcaaaaagctcacagaaacccatgtgggatgcataaaaagaaatctacatctaggaacattattgtgaggcttcagaatcaccacaaagagaagaatatgaaagcagtcagaacaaaaagatttccttcaaagaagcgaccgttagactgacagcagactcctcagtgacaataagataccaaggcagtggtaatgacctattaaagttgcttatgggaaatacttgccaacctagaattcattacacagtgaaaatatccttcaagaattaaagcaaaatgaagacatttttcagaaaaacaaaaaaccggggattcaccacctggcagactgtttttatattaaaggaaaggaaattttgttccttagggaaaaagaaaataatcccacatagaaaccctaaggtgtaggaaggaatgaaaagcaaagaaagttatgaataagtgggtgggtacaacaaaatgaatgttgtttatatagagtgaaacaaacatcacatgggattttgaaaaatatatatagagagaattaaaatgcacaacaacaatagctccgttaaatagagttaagctgttatgtgggacttacattgattgacaggaaggtaaattaaaaattataatgtggagctggggacattggctcacacccataatcccagcactttgggatgtcaagatgggaggatcacttgaggccaagagtttgagactagccctggcaacatagggagactctgtctctacacacacaaaaaaaatttaactagccaggtgtggtgacatgtgcctgtagtcccagctactccagacaccgaggacagatgatcacttgagcctaggagtttgaggttacagcaagctttggtcgtgccacagcactgtagcctgggcaatagagcgagaccctgtctcaaaaaaaaatttaatgtagaacgttggtggttaaagatgcatgatataaattttaggataaccattaaaacactacaaagacttcctgtttatggtaaggtaatgttgggatgaaatgaaacaacaaaaatccgaaaagcaagaaaaaagaggaaaaggaacataggcaagacaagatgagatgagagtgatgagactaaatgtttgggggctaaatctgccccaattacttgaaaaaaaaaaaactaaaagtaaaagtaaaaaccacattaaatctaaatggaccacattctctacttaaaaaaatgctattaaccatgtgatcttctcagtcatgaggtaatctggtgactacccttcctcaaagccagttgggatattctttgaatagagtaaaacagtgtttctaggctgggagacaccagacatagttgaggacagaggtgctagaaaataggaagtttaaaagcatgtgcggtgatgctcagaggaggtaaaccccaccctcatgctcatagcttccaatcattttctctagttcttaactcttaaatgtgagaaatgcttgaagattactagtcatctgaagaaagtctctttattaaagattttcataaaagagaccaaagcagacaaacagaaaaagacatcttggggaaaaaaacaaggataatgggaagagaaggaaagttttaaaaattatcaatatcctcagggggacaaaatattatatcctataaagacagatttttattttttaaaaaaatagaaagcaaaacaagctcctaaaaataaagtttgatagcagaaagaagaaaaagatgagttaagtcacctaaaaagagagcaaaggacaggagaaggaaaataaagaaaattagagagccaatccaagaggtacaacatcagaaaatataaatgtcagggaacaagaacagaaaaatggagggaagtgaatcctcaagacttcatgaacatttcccaaaactgaaagactcgtgttttcagataggaagcgcctactcactgaatgctaaacatgatgaattaaaataatgcacatcaaggcacagtgttatgaaattgtagaccgttaggtataaaaataaggatctggctgggcacagtggctcatgcctgtaatcccagcactttgggaggctgaggcaagaggattgcatgagtccagaagtttgaaaccagcctgggcaacatagtaaaaccctgtctctacaaaaaataaaaaaattagccaggtgcgatggtacatgcctgtaatcccagctactcaggaagctgaggtaggaggatcgcttgagtccagggaggttgaggttgcagtgagcttgtgccactgtactccagcctgagtgacagagcgagaccctgttgccaaaaaaatttttttttaaaagggatcctacatgcatccagagattaaacgaaaacaatcacctgaaaaggctctgaactcagattgatgcttctcaccagcactggaagctagatggtattggaataatacctcacagttctgaaggaaaaatatttccaagccagaattctaaacctagacaaactatcaaatataagtagaaagaagtaaacaaacacattttcagaaatgcaagatttcaaaaaatatatatctcccatgcactgttcttcagaaagccttgggagaatgtaccctaccaaaagagggagtaataaactaggaaaagttgaatttgggaaatggaatcaacttagaaagaagcaaagaggcctgtaatgataaaggggttttctaggatgacagctccatagctggaatgggggacaaccagaccagaatggagctttagtagatatattctagagcaggaaattcgagaatatataaagtagctaaaatagaagaaaatgtagacaattgagtgagagttcaagggtgaaataacaatgttaaatactaaaaaatcaaagtaaaggaaaaaggacaattattaacttcaggaaagacaaagttatgcagaaaaggaaaagtaaccatgatataaacattgaatattgattgaaccacaattatgctctaactatattgggaagaagaaagaaagctgaaaatatgaaagagcgctaaatatttactcctacaggaaagagtcagtgatctccaaaacagaaaatgcaagatcagcacaataagagaaggcaaaaaaaaaaagaaaaaaaaaaaagagagagagagagaaaaaaaaatcacaagaaacataagttatttaagagtgagagagagaaacaatcagctaaaaaaaattgtcattgcctctgtagagcaagaagtggagtgttagaggtgggctgggaactggagttaaaacaagcgttgatgaattgtatgtatttgtcattttcataaatgtaaaaactaaactgagaaaagccatttgatatttctgaaattacttagcgaataagaattattaaagatcgtttgattttaactcagatttctgtttcttcttggctgttttctgtttggggggagctgtttgcgatgtggatggattaccatttatttgcctgaatataggaatttacttctttcataatttgaaaagtgaccatactagtaaactttaaaatgtgttctaggtgtggctttagctgttattctctgtaacacccggcatattagtgacagtgttttcctagaagctgcaaaggtaaatgttttaaatgttgtttattttataaaggatgaattataaagatgagtagatctgaaaattaaaggcagagagagaatgggttaaatctgccttattaatgaaaaggaagttactcaaattacttttatgatttgcctatttatgcataaaattaatttttttaatcatgacttaaatttttgtaaactgaatcctctcgttttaataacacttagactatacttgcaatttgtatatctgaatatattgtgacagcatagataactccttgcatgtttttaatggacaagtactggtattatttggagtgctggcctatgggagctccagactttgaagtatttctgaagaactcacattaatacaattaatgtctgttttcaaagtagccattgcaattaagccaagctctacatgtgtaatataaagcagaatataatcaataagtctttaaatctggttatttattgtttagtgatgaacagttttaatttctgcagtggtttaagtgtattccttcaagaaataagaggaattatattacctgttttactctctgtttccccaatgctttttccatttactgggtccttattctgttatttaaacaaacaaaagcaaaatgctgtttttctcttcaggccctgacaagccaattgacagatgaagagctagcccaagggagactttacccaccgcttgctaatattcaggaagtttctattaacattgctattaaagtaagtaataacttaaacttcttcacattaattttaatgacattttcttatacaagaaatacaggtttattaagataaatctgaaacatttagaaggctgcaaagaagaaattttaggcccatattcttactaccagaatataacacacatgattattttgggtttgttgccttctagtcttttttctttgcaaacacatacatgcatacacacatgcatgtagtcacttgtgcctttttgaaaaattgttttaaagaatagagataggggtcttcctgtgttgcccaggctggtctctaaccccttggcctgaagcgatcctcctgccttggactcccacagtgcttggattactggcatgagccacagcacctggcctgtgcccattcttataattggtttcttactgcactttttccccttaatatattgtaagtcttttccatgtaacttaataataattctcatgtatgtgatcattaatgctgcatggcattctctttattattttttcaaaatttgtttcatcatttctctgtttttggacatttaagtttttagcttcttattgttagaaataacactgtaggctgggcgcagtggcttacacctgtaatcccagcattttgggaggccgaagcaggtggaacatctgaggtcaggagttcgagaccagcccagccaacatggtgaaaccccgtctctactaaaaatacaaaaaaagttagccaggcatggtggtgggcacctgtaatcccagctactctggaggctgaggcaggagaatcacttgaacctgggagaaggaggttgcagtgagctgagatcgtgccattgcactccagcctgggccacaagagcaaaactccatctcaaaaaaaaaaaaaaaagaaagaaagaaataacagcgtaatgaacatctgtctttacagataaatctttgtgtgtatttgtgatggtttttttttttttttttttttttttgagacagagtcttgctctgtcgcccaggcttgagtgcagtggcggaatctcagctcacggctcactgcaacctctgcctcccaggtttaaacaactctcctgcctcagcctcccaagtagctgggattacagatgcccaccaccatgcccagctaattttttgtatttttagtagagacggggtttcaccatgttggtcaggctggtctcgaactcctgacctcaggtgatccaccggccctggcctctcaaactgctgggattacaggcgtgagccaccacgcccgggctgtgatggtttttttttttttttgggataaattctaagcttaagaacaaaggtttttaaggtgttttaaggcttctgatgcatattgtcaaatgagctcttcagaaaaagtactgatttacattgcagcaattagatatgagtgtatctttttccacactttttccaatacttagaattatttttttaatcttgcatatttaataggtaaaattgtttctcattattaaggcattattagtgagattgaagaattaatatatatatattaagtgtatatatactgtttgctgtggtgcagatattttcccatttgtcatttgttttaactttatagaattgtttgacatgtctattaaaagtgttttatggaattatttgtttattttgtggattctctcctcaccttttatgaatattaatgccttctgtcactccaaaatcataactgtctacttgcattttctaaaataaaacttttttaatctctctgggatttattttaatgtatgatatgagaaagggaaacattttttcctgagtagttaaccagttgccccagcattatttattgattaatgcgtccgttgtttacagttaattgggaattgaatctgttcctgggatttctattcctgaccatttttgtttactatctgacactgttttaaattttataatgtgtataatgtaacatttagtactttatctttcccatcattatgctttttcagtgttgtcttgactgttctaaattgttttcttctggacaagtttttgtatctgcttttttaattttaaaaaactctgcaactttgtatgaaattgttgcatttataaattggtgaagttgggtctttcagtattgagtattctccaatcactatctctctttacttattaagatcttttttaaaaagtgtttcagtataattttgttttcttcatctgaatatggcatttttacttttttctaaatatttttaaatttctgtttttctaacaaagacttttttttctttccaagtatcttctcattgatcatttctaatatataggaaaaggtaggaataatactaatttgaaaacattcatttttatgaatttacttgatgaccagttttttgaacaatcttattttaatagtttttcatttcatttggaattgttgagtttttaattgtctgcaagtaattttttctttttttaatatgcatagtccgtttttctctaactataaatcagctgaaactgcagaatagtcttaagcaattaggttgataagggtattcttgtatttttttttcaatttagagacagagtctatgttgccaagctgatctcaaactcctaggctcaagtgatccttctaccacagcctcccgagtagctagaggcacatgccaccacacctggctaacatctttgtatgttaatattaaatatgatgctagcttttgattgaaataagtattttctactttttaaaagaagtagtcttctatttctagattactaagatttttcttaaacattaggattgactgtggaatttatcagccacaatttcaacttccatacagttgatcataaaattttatcattttgactattaaatttatttatttatttatttatttattttgaggccgagttttactctgtcacccaggttggagtgcagcgacgtgatctcagctcactgcaacctctgcctcccaggctcaagcgatcttcccacctcagcctcccgagtagctgggaccacaggcatgcaccatcatgtccagctaattgttttttgcatttttggtacagatgggggtttgcattgttgcccagactggtctcaaactcctgagctcaggagatctgcccaccttggcctcccaaagtgctgggattatagatgtgagccactgtggccagctttgactattaattttattattacattattttggtgcctgtaacctaagcaaagattgggaattggtaaaggatggtatgttcagggaataatagttgagcctgggggaacaggtagggaaatggcatggaagaaaatttgaaagttatattaaagccagctgtacaaatatacaaatgccaggctaaggagtatgattaccttctactgcaaaacagttgaagattttagagcccagaactaggatgatagagtccaactttagaatttatagaatgatattacaggtgggagagattttggaagatattagtcagttaagagattactgggccaggcagagtggctcactcctgtaatcacagcactttcaaaggccaaggcaggaggatgacttgaggctgtaagtttaagaccatccctggacaacaaagcaagatctcatctctaccaaaaaaaaaattagccgggcacagtgatatgtgcctgtagtcccacctactcaggaggctggggtgggaggatcacttaaacacaggaggccaaggctgcagtgagctatgatcataccactgcactccagtgtgggtgacagagcaagaccctgtctctaagaaagaaaaaagagagagaaataattggtatatccaaatgagaggtagtacatgaggtcatagaaggagacctctgcttaggattagtatagcaacagaggcccaggttcatgtctctgcgtttccccagaggcaggagtagagagtgtgctgtgtctgcagtggcataggcttttctttttaggagcaaataaggaagtggtgagtagaggaggcagagctttgtgtctgtccccaccccaaatagccactgattcacccctttggctctatgagcagggctgtgtgtgctcctctgacagccaccagtcaccttctgcatgcctccaggaccaaggggagctttctccaatctcatgccttgcccgtaatctttttctgtggttactaccagcctgtgggaaagagatttgcagtgagtgtgagccccccttatgtctaaagcttgcagttgttccagaataaaacactagctcacattgacctttggcagttccttaaaattttagctgacttcttattgtatgcatggtggccactgcctcattctccctcccatgctctgccacaagtgagagtttctgtgtctagtctgccgccttctctccttcattcatttatttataaatttatatttatttatttatgttaattatgctgctcactggcttcagaacacctcccactgcccctcacatcaggcaggccacgtgttcagctctccaaggtcggaaggaatgaggaaaaatgtgtttattccatcctcctggaagcaaaaatctctgcctgtctttttatatcattcctgtttttcctgttaagtacaaaaactgagaagagcaatttggtcaacaaactgtactaatgacatgttatgtttatttggcccttaggttttttgtttgtttgtttgtttttgagatggagtctcaactctgtcgcccaggctggagtgaagtggtgcaatctcagttcaacacaacctctgcctcccaagttcaagtgattctcctgcctcagcctcctgagtagctgggattacaggtgcccgccaccacgcctgactaatttttgtatttttagtagagacagggtttcaccacgttggccagcctggtctcataaactcctgacgtcaggtgatccacctgcctcagcctcccaaagtgctgggatcataggtgtgagccaccacgcccagccagcccttaggtttttaacctcagatctttattgcagttacctgccactgaggatctagcccttccctacttctttttcctagtcagtgataataaaatattagtaaaatatgttttctataatagaacagaaaacaattgaacacattttctatcacaaaatacactgagattgagttcttggtaccaaggattattttttaataaccatcttattctgagatttttcttttagaaagttgaaatatgaaactttaataatggttaccatttggaatgagaattagaggaggggagcgacatcttataattgtttgaattttttctaccatatgtcactacatttttttaagttaaaataaaacctgccgggcatggtggctcatgcctgtaatcttagcacttaggtaggctgaggcaggcggatcacctgcggtcaagagttcaggagcagcctagccaacatggcaaaaccccatctctactgaacatacaaaaatttaccaggcatggtgttgcatgcctgtagtcccagctactggggaggctgaggcaggagaatcgcttgaacccaggagatggaggttgcagtgagctgagatcgtgccactgcactccagcctgggtgacagagcaaggcttcatctcaaataaataaataaataaatccataacagagcaaggctccatcttaaataaataaataaataaataaataaataaataaataaaaccatgacttcagaactttactgtgtgagaggtgctgtgctaccctgtgaggaagtgtttcacattcctcattttatatcagaactgaggttcaagggcttattctcaccaccaatcatggtgtgtggcttgggtggagaatttgaaattcactcaagccacctttggtggggagtagtcgagcttactgttgagggtctaatatctagactcagaatgctttgggtttgaaacagctctcaagtaactaccttgggcaagttacttaaactcctctcattcctcatatgcagaatgagaataatgatagcacttatctcctggggttcttgtcgagagtaaaggaggtatccttgtaaaacacatagaaagtgcctggcactcagtgatagtggtgtcagttcccctgtataggttctagccctgacttcacctgaccttatagttctagtgtctaaatcctgatttataataattactatgcctcttaatccaaattctagagcagaaacctctctctcaccttgggttaggttttcttcctggtcaagttggctgtgattaggaaatagtctctgtgcccctctagaaaggccactctttcagcaagactgggaggaatgacataggctgggcaggttatctaaatgtatttactagaatgacacagtagaacttaaatgtgtttggttttatcttttaaactttccatagtttccaaatgttttgaaaggagtcaaagcaatgttattttttactgtgaaaaaagaagaatgccattcttctaaacttattttcctgtgttataatagtacgttgtctctctaataggttaatactcagagcctacacaataaccttacttatttttcaggttacagaatacctatatgctaataaaatggctttccgatacccagaacctgaagacaaggccaaatatgttaaagaaagaacatggcggagtgaatatgattccctgctgccagatgtgtatgaatggccagaatctgcatcaagccctcctgtgataacagaatagaagcactcccctgataaatactttctgtgctccagggaaccccttttttcagacaagaagagataatgtcttcagttttatggtgttttctgtgttttgttctccctgaccactttggttgatgtattttttccatgcgtctccacatctgttggggtagacgtgttgattgattgcattgcccaccagcaccctacaatcagatagttgtgatgctttaattctaacatacagcccgtaccacatccaggagatgtaaaaagtgtgtttgtgaatgtcttcacttgtactctaattcagacttgccaaagtatttgctatttactattatgggtaatactcttctctggcctagttcttacagagctactaaaatagaaatttacttttatggatagaagtacagaattttgagaagaaactaaattttcaccaaattttaaggaaaaattgtcattatctaaaaatgttcttatatatctgcttcatcttaccttcatactctgaaattccctatagcagacagagctagggaaatattaaaaatttaccctatttattttctggaactaaatcaagccttaactataacattatgagagtaatgggaactactgctggctttaagtaaataaaagtcattgttttcaacagtgtataaaaatcatagtgtaacctttttatttaataaatatcttacatttaattgcttcagttatgctatcttattgcccaactagaaatttagatttgcttatgaaaaacacatatttttgttacttctagatgattctaggagggagtataagatacctaatcatatgggaacatcacgtgactttttaaatctaaattagtcatgcttcacatcaaaatgagtcatatttaactggagaaactatgcccttattccagaactgatgctctttattgcttgagataattttggaatgttactatgatactgtttctttgaatatcattagtagtgacaactctttctccattgaaggcagacttaatttttttaaaccaccaacattaatttagagctaaatggggatgaataaggttggtgttcatctgggaaatgccttttttaatcccagtaaaatgggtaataatggctatccagaacagttttcttgtgtggcttgcatattgaagaattctaaaggaaaatatatctgcctaccatgcttgctcttagggaagaaaacttaaatgctcattctaggatagtaacaacaacagataattcatcgataatatgagcatgcacagtatttgatattgctctgtaggaaaaaagagacttcatttttttcatcttctgcctatgaatacaaattgattctttttttttttttttttttttgagacagagtctcactctgttaccaggctggagtgcagtggtgtgatctcagctcactgcaacctctgcctcccaggttcaagcagttctcctgcctcagcctcccaagtagctgggactacaggtacacgccaccacgcccagctaatttttgtatttttagtagagacgggatttcaccatgttggccaggagggtctcgatttcctgacctcgcgatccgcccacctcagccttccaaagtgctgggattacaggcgtgagccaccgcgcccagccaatttttttttttttttttttgagacagagtctcgcttttgtcgcccagtctggagtgtagtggcatgatctctgcaacctctgcctcctcggttcaggcgattcttctgccttagcctcccaagtagctgggattacaggcaccggccaccacacccagctaatttttgtatttttagtagagatggggtttcaccatgttggccaggctggtctcaaaatcctgacttcaggtgatccacccactttggcctcccaaagtgctgggattacaggcgtgagccaccacacctggtccaattcatcataattctgaatataatttaataattttaaaatggtcgcaatggcattgccatttggagtatgggaaaatgcagttggttaattcattgaacagattagtaaagtcagaagtctttttcataacatacggtcacaattcctttcttttaattaaagacaaaaggtttatgggttttggtttgtttgttttagatatggggttttgctatgtcacccttgctggagggcggtggctgttcacaggcgtgggtcatagagcactgcagcctggaactcctgggttcaagctctcctcctgcctcagcctcctgagcagcttggactaaaggtgtgcaccaccgcacctggctgagaggcttctgtttttcatgttccctttatcaaaacaaaatcacgcctaaacatactctctgtgtgaaatcttgattttagttcaacctaagaaatataataaatataaacctgtttcttgcttagtgtttattgaaggcaggaacgtatgctgaattaaagtaattttactacgaagtttgcttattaagtatgcctggtacagtcttcatggaagttattaagtattttaaggaaaaaaataggctaaatggcatatagcctgcttaaataaaataattctatttttttaaaaagctcccaattgtcattgttatttaccagtcaatctttcaacaagtatcaattattggatgtaaattaaagtaaaattgcttaatatttaagctaagaatacaggaaggactatgagcattgaggaaatcgggggaggccagaatggcatcaagctggaaaagaaattaaaacattaccttcgatgagactttacctagcaagaaggtaattattttgaataacagcaatagagaatcttttattttgaattgagaagaaattctgatgattagagtgtcagtaagtagtaggaaaaggtaagaatacatgtgtttctaatctcccaccaccacctgttgtatggaacaaattggattactagcaagggtaaggtttattgacaatgagaagttttagtccaagattttagttaaaatattttaaaattttttgattcataaccaagaagttgcctcagatcactgtgaagctttaaaatgcaggtgcctttgctcctcctccctccaggcccccgggggcagagccctggctggtgtctcttcaggaggacccctgacacaccgattctgccctcacaatcactgccttaaagcaggcagcagaatcttttggagaactaacaagattctgatgctgatgcatagggcctggggtggggcctcagattctgctttttttttcttttttttttttttttttttttttttttagacagggtctctttctttttcctttctcactcaggctgcagtgagtggcgtgatcttggctcactgcaacctccacctcctgggctcaaacgatcctcccgcctcagcctcctgagtagctgggactataggcgcaagtctatgcaaccacccagctaatttttgtatttttagaagagtgggggttttgccacgttgcctgggctggtctcgaactcctgacctcaagtgatccaaccacctcagcctcccaaagtgctggaattacaggcatgagccactgcacccagccaagaatgtccacttctgacaagctcccaggtgatgcctatgctgctggtacagtgaacaacatgctgagaggcattgctccaggatactgcatgtagtgagcagttctttagcgtttatgtgtcatatacttcaagttacatgaaaaagatcaactgaaattatgttcttacacagaatagttttcatctagttttattatgtttttacaggctgtttacaagaacaaaaatagagaatttttgaacatatttttctgaaaacataaaaactagaatactctttaattctaaattatagatttgtagcatacttagtaaacttagtaaccaattttcatttgtaaaagattagctatcaaatggacatttatttctcttagttttcttatgacatgacttgccttatatcctttgtcctttttctgtaacttgtcagcctctggagaaataggattttacatttttgcaaatgagttgccaatgaattaagatcaaaacgtcattattaaggagtatgaagcattatttactggctctcagataacagaaaacccaaaagggatggtggcggagtgaagaaagccttgccttgggaaaaatacttcaaatgctcccatagttttttttcctcaagcccagtcagtatccttcaaggataactttttcataccttttttttggtttgtttgtttctgctagctttatgacagaggttataatattcttttctcctctcttctttgacgtgttacgttgtcttttttttttttttttaacttcttcatactcttaaaaagctccagaatggccaggcgcagtggctcacgcctataatcccagcactttgggaggccaaggcaggcggatcacgaggtcaggagatcaagaccatcctggctgacacggtgaaaccccgtctctactaaaaatacaaaaacttagccaggcgtggtggcgggcgcctgtagtcccaggtactcgggagtctgaggagtgaacccgggaggtggaggttgcagtgagctgagatcgcaccgctgcactccagtctgggcgacagagcgagcctccatctcaaaaaaaaaaaaaaaaaaaaaaaaatctccagggttctgttgaattcaccaaaatggggtcagctctggtgagcctatgtaatactcgagaacattaatataaacccatagctctttactgggcttccatttaaagggaagtcctaagaatgaaatggcaccagcatcctgtttccatccaagacaagaccacacgtgttcaggtgccatgtattcatatagctctcaactgattggtgatttgcactttgtgcatctaattattaaaatgaaactctctacaggtgagctgaagtaacatacttcatatttaaaaagttcacagcaatttgaccatagaaaactttctcatctgaaatcagggtaagtttttttaatgtaagcagagaaaaaaataaagcagtgttttatttcaaatttcagtaagttcaggtgggcctaattaagacatgactattattacaaatcctattcttgccagaagttacttagatagattagtgattagattttaaaaacattattttcctttcttgaataaggaaaattgtgcatctcaaagagaaaagtaaatatggaaatatgttcatagttcagttgcataaaatagacacattaagtcaagtgatttgaatgcttagtgtcttttggtaaacagcattttgtcaacaaacttttcatatggctatagaatcttgttttttccaaataaaaactttgcaattgggagttattcctccattcagcacactttttaatgttaagactaggggaaacttgtgggtatatattcagtggttttcaggattttcttttatgttctagaaaagtaatttttcctttcctagttttaagtatatattcaagcaaatcgttgattcctatacagccattggattatcaccaacacatttggtatatacagtgggccgataatgacaaactaaagtttgtggttaatacctactctataccagacactgttctaaggatccgacatatttaatcctctgtttaccctctgtttctgtgcctgatttacagacagagacagaggcacagagaggttaaatgacttgtcaaaggtcttatgatgtgtggcagagcctgggtttttagctcaaacccctctcagtgaagaaagccttctgtgtaggcaatttcatctaataccttcatgaattgttacttcagatgagaattctcacttattcttttttttttttttttttcttttctttgagacagccttgctctgtctcccaggctggagtgcagtggcgcaatctcagctcactgcaagctccgcctcccgggttatgccattctcctgcctcagccttccgagtagctcggactacaggcgcccgccacctcgcccagctaattttttgtatttttagtagagacggggtttcaccgtgttagccaggatggtctcgatctcctgacctcatgatccacccgcctcggcctcccaaagtgctgggattacaggcgtgagccaccgcgcccggcctcacttagtcttttaccagttcatctgatttttactttgttcccatttataattcaaatataatataaacgtcttattcatttagtcttcagcattttaagtattcgacacgaacattaaagatttggtgttgaatttaataaattacaccaaaaagtctcagtagccaattcactaacatcttttgatttggtaatcttcacagaatcaacaactgttaacacttctgtgcaaataaatttcagttgtgcttatatattataatattcactttaggaatccacctgtcaatttgcaattcaattataaggtatattttaagtgatatctatgtattgtatacacatattccattgaaaggtgagaataattagaaagtagtaatataaaaatgtgtatgaaataagaactttcttaaaagacctagtttagctaaatatatgacaatataaaatgtctgcccaatgtttgattatactttgtctaatgacctttaaatttaactgaaattaaaaccgtacttttgcagttgatatttttgtgttccctttgttaacataccaagcactaattattgacttcaaggaagccacgtattgcaagtcattgcttagcctttcacatctgagtgttgataagatgacggaatgggtagtcttgtagtaattgcttatgggaatgctagtttaagaggaatgccttgtatagaacatattataccagattgacttgttaaaaatggttccaagaatcagtctaaaaacttcagaattatgtgaattattttttctctgttgtgatatgttgtaatgagatgtgtgttcttatattttcttagtaaaattttcttaagcataaaatgctttatgatcttgtttttaaaggctctgtgtataggacacttttaaaacttggtaatataaaccttaacacacactctctctctttctctctctctccagaatacttgatctcttgggaatgtattgttggacttaaattcacctatggagtactagttttgctcctcatcttttcattcccttttgttgagctccctaccctattcctctccttacttgatttaattatgatactaaaggaattctctatcgccttttcttctccccacttctcacacgcaaacaccaagaccctaatgttaagatactaaatcaggagagactatgttgattttgtgatgaaggggggaattatataataacaaatacctactgagaccctcagataaaagttctttttttgcctcaggattcatgaatagctcccaggagtccacgaagcccctgaaataatacatgatcctatgcttgtgtctcttggagagagagagtccatcaccttcatgaaagggccctttcttttcccgggataggttgagaaaaactagcctacgcctctttttttttttgagacaggttctcactctgtcacacaggctggagtgcagtggggcgatctcagctcattgcagcctctgcctcctgagtgcaggtgattctcccacctcagcctcccaaagtgctgggattacaggcgtgagccaccgtgcccggccggcctacaccactttttgacaactccatcatacttctttattgggagggctggcatggtgaaaggccccaacttgcatggaggctgaaataggtagccagaccaataaaggcctatcgttgcctctatagcaaataacacctagatacctcagcaagagcagtgggtcagcagcacctccttccccaaatacaactgctctgttcttgaatcctgaacagtgtggacctcaaataccacctggtctgtgtctaaactgaatagaatacaacttcaaaaacaaatgattttctttctcaagctgatctaaaaattacacttacaacctcgcagatctccaactgctgggaatataagtaactaccatccccaattgctgcgctctgaaattcatcatggctttcacatggaagccatgcctcctgtgggctgctcttagccagtgacttctcacagcagggatggtatgacaggcctattcctggaagacaggagagtcctctgatgcatagctttagctcaagccctgccccgtggccttgccaagctcagaactgtacttcaacctaaggcacttcttcactcaacctctctttctttcctctctctttcacttgggatcagatctgtatgacgctatgaaggctcttgcaggctcttcctggctccctccccaccttcacagacatttcttctcatataaattacttgcatatcagctgggtacggtggctcatgcctgtaatcctagcactttgggaagctgatgtgggaggatttcttgagctcagtagttcgaggccagcctgggcaacacagtgagacctcatctgtacaaaagatacaaaaaattagccagcatggtagtgtgcccttgtagtcccagctactcgggaggccgaggagggtggattgcttgagcccagcaggtcaaggctgcagtgagtcctgactgagatgttccttcttggatgacccagactaacagagcagttgattcaggatgtagttttgcagatgagaaacactaaaactattagagctattggtaaggtaattagactttctagattttctgatatgatctttcttccagatatactgtctcaactccagaccatgttgtgagctaacctaaaccaattcggacacatgctcccaaaacaggtactttcaagtcaataacaataccaaagaggtttgaggtgggtaagggttagctaccccctacaaccttactactaggttttaataaaaacaagtctcagaccaaattctgccatgtatacaaacattcattaagcaaatattcattaataagcaggcacaggccaggcatgatgactcacacctataatcccagcactttgggaggccgaaacaggggaatcacttgagcctaggagttagagatcagtctgggcaacatagtgagaccttgtctctacacaaattaaattagccaggtgtgtttatatacacctgtggacccagctacttgggaggctggattgggaggatcgcttgaggctgggatgtcaaggctgcagtgagtggagactgtgccactgcactctattctgggtggcagagtgagaccccgtctcaaaaaataataagaataataactggccgggtgtggtagctcactcctgtaatcccagcactttgggaagccgaggcaggtggatcacgaggtcaagagatcgagaccatcctggccaacatggtgaaaccccatctctactaaatatacaaaaaattagccgggcgtggtagcgggcgcctgtagtttcagctacttgggaggctgaggcaggaaaatggtatgaacccgagaggcggagcttgcagtgagctgagattgcaccactgcactccagcctgggctacagagtgagactccatctcaaaaaaaagaaaaaaaaaaaaagaagaagaataactaaataatttaaaaaataagcagacacaaaacaattcatacttcttagtctactcaggctgtcataacaaaatatcagaaactgagtggcttaaacaaaaattatttcttcacagttctggaggctggaactccagcactaaggacacaaatcctcaatcgggccctacccttatgacttgatttaaccttaattccttctgtaaagacctcatctccaaatacagtcacattgaggtttagggattcaacatttgaaatgtggggagagattcaatttagtaaaggttcgctcaaggagaagaacaacccagaggcaggatttttatgccctctacttggcatcatgaaatcagaaaaggttctccccaagacagccagggaatccaagctcaggtgccactccaaggcacctataatctcaatagattctttagtttgttaatccaagggtggagaaaatctctgaattatttcagccaatctatctatattgaataccctgcattttaccaatgagagcttctttctaacattcatcatgctaacaaaccaataaaatccattttttgacattcagtatgctaatttgcaaatcattggttttctatcaaaataatagcagaaggtcttgtggtagctacttttgcagtgcagctcttcctgatttaaggcaatcactccagtactcttattggctgaccaccccctaaaattaaagcttaaattagttgacaaatacttaataatacatcagtagactgaaatacttaaaagcaaattacaggtggggcgcggtggctcgcgcctgaaatcccagcactttgggaggccaaagcgggcggatcacttgaggtcaggaattcaagaccaccctggccaacatggtggaacttcatctctacttaaaaatacaaaaattaggcaggtgtgtggcaggtgcttgaaatctcagctactcaggaggctgaggcaggagaattgcttgaacccaggaggcaaaggctgtagtgagccgagattgcaccactgcactccagcctggacaacagagtgagattacgactcaagaaataaataaataggctgggcatggtggctcacgcctgtaatcccagcactttgggaggccaaggcaggtggatcacctgaggtcagaagtttgagaccagcctggtcaacatggtgaaaccctgtctctactaaaaatacaaaagctagctggattgatggcaggctcctgtaatcccagctactcaggaggctgaggctggagaattgcttgaaccagggaggcacaggttgcagtgagccgaaatcatgccattgcactccagcctgggtggcaagagcaaaactccatctcaaaaaaataataaataaaataataaataattaagtaaataaaataaaattgtagctattgtaacagatcatctgtcccaatttcacttagaaaagagtcactacagatttggaaggatagtatttaaaaatgctatcaagaagggtatggaaatagttcatttgagtgaaatccaagtgccactatcacacacacacacacaatgtagaatgaactgaggaagaagcaggcttagatgaagaaagcaaaagttctgtttgggtcagttaagtttgaggtgtgtattagacacgttttgggtgacacttgacattcaactctgttattttggagtgatttctcactatgtgtggtgttgcaggggataaggtgttctgtcctcctctatagaagccaaagctggtgtggggaggatccgtctgctccctacctcatggcaaccaagaacagaggccagtatctactggtgttgtgtccatggcaatgccctaagaaggctctgaggcaagaccttgactgtggttcctgctgcctccattagctcatgttttctgtcagttctgtggattatccagtttcctttcagtctgcttaaattagccaaaattaacttctgttctagtaaccaacaattctaactgacatcgaatgaagaagatcttagctgtttataagggtgtatatattagatcattcaaccagactttatgcaaaatgaggacaggagttgtgttttttattttatatagtctcaaaatctctttctcacccagtccagggctctttctctctttctttctttccttctttccttccttccttccttccttccttccttccttccttccttccttccttccttccttccttccttctttcctccctccctccctccctccctttctttctttctttctttctttctttctttctttctttctttctttctttctttctttctttctttccttctttctttctttcttttgactagtcaagcacaatagtgagaagggggtaaagagtagaacaaggagctgaatctgtaactgactgtgaacaatctattgaggttaatcattacctttggaccagtacagggctctttctctactctataggtttaagcagtgcttgatttcacataatcaaatgatcaacaatttctgactataatttgaaagaaaaatagtgatgaagcctgccatgttagcagtttgttggctctaaaacttgcctactacttttttactaatttgtaatcaaaggcactattttcccgcttcattctatgttaattacctctgtagacaaagttcatttactgattctaggagaccactattatattacatgtagattacctctaagcagagagcaagagagaaaagagaaagcagctttctcttatctgtataaattatagtattagatgtgttaagtatcactttgaaatgacttaaatttgaataacacattacaaagcatttcaacaagcaccatttagtccttatagcaaaagtttaaggcaaaaagagcaattattaacctcattctaccaataaaaaaaaagaggctctgaaaagttaaatgaccacctgatccaggtcactcaaatacaatgggacaaaatcaagatttaaattgtattttgacggaaaagtccatgtggttaagcaatgaaaaaagacaaatgaaaaattgggtaaaagatgtgcaacttatttcatagttaaagagttattggccacgcgcagtggctcacacctttagtcccagcactttgggaggccgaggtggggggattgcttgagctcaggagtttgagacaagcctgggaaacatggcaaaaccctgtctctacaaaaaatgcaaaaattagctgggtgtggtggcacacacctgtggtcccagctacttggggggctgaggtgggaggatcgcttgagtccagggagatcgaggctgcagtgagccatgatcacaccactgcactccagcctgggtgacagagtgagaccctgttacaaaaaaaaaaaaagagttattatccctaatatatagaaagcaccaaaaaaaaaaagagaagataaaggccactaatacaatagaaaactgaccaaaagatatgcacaaaaagttcacagaaaaaaatacaaatggggccaggtgcagtggcttacacatgtaatcctagcactttgggatgctgaggcaggcgcatcacttgaggtcaggagttcaagaccagcctggccaacatggtgaaaccccgtctctactaaaaatacaaaaattagctggcctggtggcgtgcacctgtaatcccagctacttgggaggttgaggcggcagaatcacttgaacctgggaggcggaggttgcagtgagccaagatcatgcaagtgcactccagcctgggtgacagagcaagactccatctcaaaaaaaaaaaaaaaaaaaaaaagcaaatggatcttaaatttatgaaaacatactcaacatagcgcacttatcaaagataaatgccattttaaactacattaagatattagattggcaaaaatccaaaagtttgacaacattattggcgatgaagatctgaggaaaaaggcactctcataaattgcttaacggaagtcaaaatggcacaatgctcatggagggaattttagcaatatatagcaaaattatatgtgtatttaccctttaagccatccatcccacttggtataaatctatgccaaagatacacttgcaaaaataaaaaattacttatgaacaagactatttgttaccatactgtgataacgaaacaaaacaaaaagcagaaagcaaaactggaaacaacccaaaggactgactgaataaaatgatacaaaatcacacagcaagtactagataactgtaaaaaggaatgaggaggaattttgtgtattgatacagggttgtgcttcttagaacttccttcagaaaaaaacttgccattcagctacaaggagtgcacctttactagttcattttggttttcgttcatgggaattttaattatcatctggaggccatttgctttcagcctgaagatattcctttagtatttcttttttctttttctttttcttttctttttttgtttttgagatggagtctcgctctgccatgcaggctggagtgcagtagcacgatcttggctcactgcaacttccgcctcctgggttcaagcgattctcctgcctcagcctcccgagtagcttggactacaggcatgagccaccgcttttttatatatttttagtagagatggggtttcaccatgttagccaggatggtcttgatctcctgatctcgtgatctgcttgccttggcctcccaaagtgctgggattacaggtgtgagccaccgtgcccagcttcttttttgtttttgtttcttccaacagggtttcactttgtcacccaagctggagtacaatggtgtggtcacagctaactgcagcctcaacctcccaggctcaagtgatcctcctgcctcagccttccaagtagctgggactacaggtgtgcaccaccatgcttgtgtagttatttttttatttttattttttgtagagaagaggtctccttatgttgcccaaggtggtctcaaactcctgggtttaagcaatccttccatatcagcttcccaaaatcctgggattagaggcataagccaccacactcagcctggtatttcttataaagcagttctgctagcaacaaattctctcagtttttgtttatctgagaaagtctttattaatcttcatttttgaaagatagctttgctggatataaaattcttggttgacaggttttttttctttgtgcactttaaatatgttatcccactgccttctggctttcattgtttctgctgagaagtcatctcttaatcttgtaagtgatgagtcattttccacttgctatgttcgagatttcctccttgtctttgcctttcagcatttttattatgatgtgcctgtctgtaggtctctttgcatttatcctatttggagtttgttagcttcaggatgtggagattattgtttttcaataaatttggagaaatttcagccataatttcttttcttctgcttctttctccctctcctgatattctcaatacaccaacattcgtgtgcctaaccatgacccacatttttctgaggttttatttatctttcttcattcttttttctctttattctttagattgcataatttctgttgacccagcttcgaatttgctaattatttcttctgttagttaaaataaactgtagggcccctctagtgagtccttctttctttccttccttccttccttccttgaaatgaatagaataacatataaaagaactccaatatgtctggcaggagatttctctgtggaaaacttacagaccaggagagaattgcatgatgtatttaaagtgctgaaggaaaaatgcttttatcctagaatattgtatccaatgaaaatattcaaaaatgaaggagaaataaagatttttccagaaaaacaaaagctgaggaattttgtcaacactgcacctgtcctaaaagaaatgctaaagggaattcttcaatctgaaagaaaaggatgttaacaagcaataacatatcatctgggccaggcatggtggttcacacctgtaatcctaacactttgggaggctgaggtgggaggttgagcccaggagttcgagaccagcctgggcaacatggtgaatccctgtctctacaaaaaatacaaaaattagctgggtgtggtggtgtgcagctgtagtcccagctacttgggaagctgaggcaggagaatcgcttgagcccaggaggcagagcagtgagccgagatagcaccattacactccagcctgggcaatgggagtgaaaccctgtctcaaaaaataaaaaaaaaaaagatatcatctgaaggtaggaaactcactggtaacagtaagtacacagacaaatgcagaatattataacactgaaactgtgttcttaaattcaagacctagaactgttaccgacctcgatccctggtggactgaacaaagagagtgaatgcgggaataaagacaaagacaaataaagacaaagacaaacaagtatgtttggaagaaggggtcgggggcaccttgcttctagtggacaaggacccagactttctacagcccttcgtatttattggtaaaagagatagtgagaagtggggtggcagaaaaggtcaggtgctcggtccacagtgggcttgcaaaactgcattcctcgaacaataggctctagatgtcccagtagataacctcaaggagcccggtgccaggcagtgaccaccctcagcaaaccttctggtggcaggcacagtgtgagtttgcccacatcctgcattcatgataaacagtttgctgtttgatcatatagcctccagtggaatgctgagttggtcatgatacctttggccttttcagctcccaacatagaactagggaaactactaaaagaaaacactgaggacactctccaggacaatgatctggacaaagagttcttgagtaatacccaaaaagtacaggcgaccagagcaaaaatggacaaatgagatcacatcaagttaaaaagtttctggcacagcaaaggaaacaaccaacaaagtgaagaggaacccacagagtgggagaaaatatttgcaaactacccatctgacagaggattaataaccagaatttataaggaactcaacaactctacaggaaaaaatctaatcaattaaaaatgagctaaaagtcttaataggacttctctcaaaagaagacatacagatggtcaagaggtctataaaaaggtggtcaacatcattgatcatcagagaaatgcaaattaaaactacaataagatatcatctaaccccagttcaaattgcttctatcccaaagaaagacaataatgaatgctggcaaggatgtgcagaaagaggaacccttatacactgttggtgggaatgtaaattattaggttgctgcaaaagtaactggtttttgacattgaaagtaatgacggccagacgtggtggctcacgcctgtaatcccagcactttgggaggccgaggcgggtggatcacctgaggtcaggagttcaagaccagcctggccaacacggtgaaaccttgtctctacttagagtacaaaaaaattagctcggtatggtggtacgcacctgtaatcccagctacttgggaggttgaggcaggaaagtcacttgaacccaggaggcagaggttacagtgagccgagattgtgccactgcactccagactgggggacaagagcgagactttgtctcaaaaaaaaaaaaaaaaaaaaaaaagaaagaaagaaaagaaagtaatgacaaaacatcacagaacaggggaaaatcccatttaccctgatgtgattattacccattgtatgcctgtatcaaaatatttcatgtacctcataaatacatatacttaccatggacccataaaaataaaaaaatttaaaaatttaaaaagttataagagaattaggaaatttgaacagtcactgcatatttgatgatattaaggaattattttcttatttttataatataatgatattatggttctattcttaaagtccttatcttttatatatatttacatactacaatgctgaccatcattatattgtgatgagatttttttaaagggtccttaaatgttcatagaggtatttatgaataaaatgatattttgcctggaatttgctaaaaaataatccagggttttgtttttgttgttgttgttgcctttggagagagacggtgatactgtggatggttgtcctctccaaatctcatgttgaaatgtgatccccagtgttggaggtggggcctagagggaggtgtcagatcatgggggtgcatccctcatgaatgtcttagtgccatgcccttggtgatgactgagttctcactctattagttcactggggagctggttacttaaaagaagccttgcccctcctcctcgctgcctcagtatgtgacatgcctgctccctctttaccttgccatgattgtaaacttcctgaggccctcaccagaagcagatgccggcagccactttctgtacagcctgtaaaactgggggccaaaataaacctcttttctttataaattacccagtctcaggtatttttttatagcaatgcaaatggactaatacagaggaattataggtgtaacaagatggatcagatgttgctaactgttgaagtttagtgatgattgtatgtaaaggttcattcataattttctcaacttttatatgtttgaaatttcccatgatagaaaattttttaaatgaacaaacagttctatccactattctctaaaagtgtgataacctctgagaagggagtaggaagctttgatggatgggcagaaataagtcctagccaggtctatggagaatactgctctgggagatccctagctcaggagtcttaaacccctgggctgcaaaccagtaaggtctgtggcctgttaggaactgggccacacagcagaaggtgagcggcaggccagcaagcattattgcctgagctctgcctcctgtcaggtcagctggggcatcagattctcatagacctgtgacccctattgtgaactgcacatgggagggatctgggttgcatgcttcttatgagaatctaactaatgcctgatgatctgagatggaacagtttcatcccaaaactctatgcccaccccctgctcccaaggaaaagttatcttccatgaaactggtacctggtgccaaaaaggttggggactgttgtcctcgctgattgtgatcaagaccaagctgtagaatgctatgtgtcttcttaaggaacttttagctaggcaagtgtcaggagagataagtccaagttccagtgttcaatgctttgttaatttagaccccacttgaccaagtccattttattttttttatttccacattaattcaagtgtcatcatcctacaagattcagctcaaatcctacctcttcctcactcatctcttagctagtgatctccctttttccatatccttttaagtggattgtttcctgactgagtgtaggctccttaaaaccagggaccggcagggcacggtggctcgcgcctgtaatcccagcactttgggacactgaggcgggtggatcgcttgacctcaggagtttcacaccagcctgggcaacacagtgaaaccccatctttacaaaaaaaaaaaaaaaaaaatagctgggtgtggtggcttgcctgtagtgccagctacttgggaggttgtagtcctgtagtcccagctactgatacttgggaggccgaggtgggaggattggttgagtccaggaggaagaggttgcagtgagctgagatcgcgccactgcgctccaacctgggtgatagagtgagaccctgtcacaaacaaacaaacaaacaaaaacccaaaaccagggaccatgacaaatttttaaaatctctcagccccaaaaataatactatccacaaagtcagagctccattaatactggaataaaggttaaaagagcccaataagtagaagtagatgagttaatgatttttaaacaagtggcagtctctctgtcctggtagtttcaagaaacaccactccgattcctattttgaagctgctggattttttttttttttttttttttttttttttaacagagtctcgctctgtcgcccaggctggaatgcagtggtgcgatcttggctcaccgcaacctgcacctcctgggttcaagcgattctcatgcctcagcctcccgagtagctgggactacaggcgtgtgccaccatgaccggctaatttttttttttttttgtatttttagtagagacgaggtttgccatgttggccaggttggtcccgaactcctgagctcaggcaatccgctcgtcttggcctcccaaagtgatgggattacaggtgtgagccacggcgcccggccagctgctggatattttgaccacctcaagtacgctgagcacgaaatcagtgcatctggcagtacacaggagcttgaaatactttttttaaaagttgttattcaaactgaaggagtttttccctgtggtctgtaatcgccacgtgcccgttctgtatacagccagcctgggtttttcaatcccacgtccgctacctaagagaacaccaaggcttggagtgagtatggcacaatcagcttcagatgttaagcaaatattccaacctagagtaggaaaatggaatatggacggggctttatgaaggtgcatggtcaggcaaaggatcttagtggatgaaagacagtaaagattcatcccaaccaaagaccaaaaatgacacatatgtatgagcaaaacatcaggaagaacactcttatgtggaaaatattacacggaaaacaaaagaagagtaactttttcccttttggtttatcccgctctggtcctcagggcgatagctaccacctgacacacagcgacctgggaaagagggaaactcaatcactgccctcgcggcccggggggagcccggaagcgcgcccagagccaggtcccgcgcgggcgccaccgagcgcggacctccctcgcatcctagagcggccgcgcgggacccggccggcggcgcacttccgcccgggcgcattgtagccccgcggacagctgggccagggtgcgggcctgcgcctccctcggctcctggcgcgggcctcggggagagggtgagtgcggtagggcataccagaggggggcgggcgcgcttcctcgggactcgccggctcgaccaggcacggcccggcgctggggacctaagcctggggagcgcccgggagcgaggacgcgcctcgttcaccgccccgggccggagtctcggcgggccggagcctcggccgcccggcgccgccgcccacccagcctttttcgaggccaacacggtctcgtgggggagcctgggctctctggaggccggaaatctggcctctggcctgcctgtgccttggcctcttactctctgccgcccggcctcggttctttcagctctaagatggaggacagcgatatctgccctaggcacaccacagggtgattgcagggttgacactgcctgcctgaaaacgaaggagcgccggttctcaacccggcaaccagtagaatcgcttgggaagcctccaaatgctgatgccccatcatcaccggggaattgtgatctgcggccaggaccgagatccacgggcccagagtgaaatgacagtactgtgatcacgactggaatatgcacttcgccgaacgtggatcacagtcttgagaaagcaagcagctgggtttttgttttgttttttttccaagaagacagggacctaatctggtttgctcgcatttaattcctagtgcctagaatggtgcatgtcccaaaacatgcaccattgattaaataatttctgattacttcccgacctatttggagggttttcattatatttgttttaaaattattatggaaaccttcaagtcatatatgaaaattgaatagtaactgaactcccaattcatgatcaattctgtttcatctgttaccctctcccccactgtagtattttgaagcaaatctgaaatgtaccattccatctgttaccttgttcatgtttataaaacacaataacacctttttaaaacataaagccattatcagtgtacttagcacttcattttaccctctactatccagtcagcatttacattttcctagttgtctctttcctcttacccagtttgtccaaatcagtatccaaacaatctacacacgttatatttggttgatgtctcttagatctctcttaatctttttctcttgctctttattttgttccctgtattttacttgaacaagtcatttgtacggttcacgttttctacaaccaggattttgctttttccatctcggtatcctttaataagcaggtatttagacctgcagacttgttcaggtcaggttcgattttttggcaagagaacttaatgggggattactgtgtttttcacattgtatcataccaggagttagatagcatcttgcctctctttgtggaccttttatgtacaagtagcaccgtagggtaacaattgaccagggaatgccagcaaatacatgcaaaagaaatgagagaatatcaccttttggcaacccctaatgaaataatggatcctggcaatgatcactagcggctgttaacgtcagaaagagagacagctagacaatgcgtgctgcctaatggggtactcccatcagacagcacaccgtttgtcttatcaagtattcttggagtaatgggggtggtgtgtatagatgaaacatgattgcctatgagttaacagttgttgaagttcaatgatgggtgtatggcattgcattatgctaatctctacttctgtatgtgtctgaagtttttcagaataaaactttttttaaaaagattgattagttgagtagtgagtttaggtcaacctgatccatacattgcagttctctgttagcctttcactaagtgattctcaaatcggactccatgttaggatcacaggagaaggctttttattttatttatttactttttaatactaaaacatgtctcacttgcagaatttcctatctaaatgttctgggatggagcccaattattgatagggttttttgttttgtttgggactacaggtgtatgccaccatgcctggctaatttttttatagagacagagtcttgccatgttccccaggctgctcttgaattcctggcctcaagccatcctgccacctcagcctgccaaagtgctgagtttacaagcaggagccaccgtacctgaccttcactgatatgttttaaaagctctccaggtgattctaatatgcccccggggttatgtactactgatctaaatccattatttgttagggatgacaaagtgattatattctattattccttctgcagttaatttgcctttacaaatgttaactttctgcattctgtttattcttacctatcttgcaaatcaataaggaagcctctgcaaataaagctcctttcttagcagaggaagacttgatcttggaggtgataatgtagagtaacacatgaaagggatgttagcaataacctcaacgctatgcttaaggtagagatgcaccaccttatgtatgagggttgggggcaggaaatatggggaggggctgtttcccaaaatggaagggaagactaggtagtgtgtagttagagaagcatgtttggccatatgacacatttccaaaaaaaaaaaaaaatcatcagcattaagtaaatataaatttaaaaaaaataaaatgccactcattgaaacataatgcaataaatttaaaagaaaagttaaccccccgcacagcccccaccccatcactttaattacccctgagataacccatattaacaggatggtgtgtatcctctcccacatcagactttctctgtcttacataaatgtaggggtttggggtattgttataaaaacgagatcataccatagccatctgtaacttttctccttgtcatccctccacaacagtagttacagaagactctattagctgcagaataaatagttgatagactaaataatagcacaaatgtacaataaaatattcagccattttcctattgacatttttagattgctttcatattttagccatcttgagagcaacacaatacacgtcattttacatagctctttattatttgggtagattaccaaaaatgggattactgggtgaaagcatataattatcaacagcatcattattactggtaatatatattccaaattattctccgaaagcctaatcgcaattcataactttgtcaccattagtttgtgacagtagccatttaccgtcatcctggttagcactgactagcattgctctattgatatttgcctgccagctgatgtgtggtaaatggtctctctttttgtttgttgtgagagtgggtcttgttctgtcaagcaggctggagtgcagcagtgaaatcacagctcactgcagccttaaccttccaggttccaatgatcctcctgccttggcctcctgaaaagctgggactataagcacatgcctccatgtccagctgatttttgttttttaatttttttgtagagacagtgtctcactatgttgcctaggctggtctcaaactcctgggctcaagtgatcctcccaccccagcctcccaaaatgctgggattgcaggcatgagctaccatacccagcctctttgttctttattttgcattccactaactacctggagactgaacccttatcttttatttattaacttaaattttttaaatagatacacgatagttgtttgaacccttttcatgcttataggccatttggatttcttctgtgattcatatatatacatatttatgtatatatatgtgtatatatgtatatatatgtatatatgtgtgtgtgtgtgtgtatatatatatatatatatatatatatatatcctttgcctgtttttctgttgcacaagtatttttgtattttgaatgcatttgcataaactttttttttttaggagcattaaccccctgtcataagggggcccaaacttttttttttcaggttttttttcttgtcctttgactttatgagtctcaatatatataaaagattttatttagtgaaaatgtctgtttttaaagtttctggattttatgtcttgccaataagggcttcccatctccacagttaaatgtataaacattctcctaatttttttgaacacgttattggattttttacatttaaatttcttaactacgtgaagtgtatttttatatacaatgcaaagtgagcatctttctttgcttttttctctgctagaatagccaattatgtcagtgccattcattaaagaaaccacactttttacacctttgttatatactgtattgattccgataggtagctggtttatttctgaactttcccttcccttttacctctatttttgtgccaatattattgtttgtatgtatgtatgtatgtatgtatttgttgagacagagtcttactgtgtcacccaggctggagtgcaattgtgcaatcttggctcactatgactgccgcctcccaggttcaagcaattctgctgcctcagcctcctgaagtagctgggactacaggtgtgcgccagcatgcacgactaatttttgtatttttagtagagacagggtttcaccatcttggccaggctgctctcaaactcctgaccttaggtgatccaccctcctcagcctcccaaagtgctgggataacaggcatgagccaccgtgcccggcctattctgttttaattatgtcagattgctgtagtaaatgttaatacctagaaaagcaggtcaccactcactgctttttggaattttctcatcccttctcagacatttatttttccttccatatgatttttggattgtttctgttccaaaataaatcccactggaagtctgatagaatttccaccaaatacatctacattagcttaggaaggatgaacatctctgtgatatcaagtcatcctatcagggacataatgtgtatcttttattcgtgtgaatcttttgggtgctgttcctttcctgctaactttatttctggtaattttgtttttgctcttagaatgggtttttcccccatttctgtttttatcttgttattgctaagactgagaagagttactgaagtttttgtatattttatatctagctgtcagtcaaattctcttacagtagtttttcttaagcttctttgttttcttccctgccatcaatgtggataatctataatcagttatgtataaatttcagttcattctaatatattctgtttgatacatatattccatctcagaagtatatcagtgatgtcagatgtacctagaaatagtgaaaggaatagtgccaggagttggaataaacctgcacattcaacaggttgttgctgatcacttaaaatagcagagtcccaagtcctcgtgagtcatggaccatgtcatgtagggagtgagacatttgttcagcattattgtgaaatatcagcatgactatagagcataatagagcattactgttatgattgttcagagaaagggaaagggctgatcattatgggcatcagagacaccatatggtgagtatcattaaataccatctcttgccctgtatctcaactagagttgttgttgtttagtgtttattagaaggattttttttaaaaaaattagtaagtagaaagtacagagtgttcccatatactctcttatccctcacccctcagtttccccttattaacatcttgcattaatgcggtatatgttcagaagcttaagggctcatgaaaaaaaaatgaaaaatgtgctacatgtgttacagttgttgagccaatattgatacagatacactgtcaactaaagtttacattagagctcattcactctagtggtgtttattctgtgtacagttgaccaatgtataatgacatatgtctgtcttactgtatcatacagaatcgtttcactgccttaaacatcccctgtgctctgcctgttcattcttccttctctcaccctgtatcactagcaagcacgatttttactgtctccatagttttgcctttttgagaacatcatatagttagaattcagctatagtttttaattgcctgggtttggttatttttgtttgtttgggtgtgtgaacaattatacaagatttgttaacttgtagttttagccaagttattaaaaccttactgtggatatgtgtggaatactatgagagaccaagaatccagactgttctaaataaccaaaaagtaataatagagataaatattacaggaatatgtttttggtacagtgatatgaaataatccccagatgatctttctgttgcagggtggaagatgtctatggatgtgacattcctggggacgggtgcagcatacccatctccaacccggggtgcctctgctgtggtccttcggtgtgaaggcgagtgctggctctttgactgtggggagggaacacagacacagcttatgaaaagccaacttaaagcaggttagtgtgccttcagctatctcattaagatttttttgttgttctgcttcattttcttggctctccttggacattttgtttagaaacagccctgatggttgcatcccacttcagtgctacaccctggtgagacttggaaggcctgcaggcatctggccacgtccactgaacttcatttacttatttacttgcttttcatttatcctgtagatgctgaaagcaaggattcatgtaggcttggggtttgggaaatgtcgtgggatacaccaggcatattagatgaacactgccttagcaaggaagcagtgtacatacttacctccaccaggagatagttttcatgagaggatgcaaagggtaggaaatgtttggaggagggagatgttgttttcctcttggggttatcagggtaaacttctcagagaagttgacctgtggattgtcaaaggaggaggaggaatttcagggctgaggagaagaagggcatttcaatcagggggaatggagtgagcagaggccagcacctgggagatagagcagtccagtggtgaaaagcttcagctcagagtcaggcagacctgggttctagtcctggctgtgtcttgggcctgtgaccttagcatatcagcaaacttcaactttactttcccgatcttgaaaatggggataaaaagtctacttagaaagggtgttatgagaattacatgtaatcatttattctctgtgtgattgcctctttctcagttaaatcttagctcagatgccatcttctcagaggctttcccaaatcctcctggattaagtagttcctctctcaccccagtcattcctttactttgtcctatttttattgacttcttagcatcatcagtatctgaaattatgttatttagtttgtttctgtgttctttatctccctatactgtaaagtacgttccatgatcatttatatacctagtagatgcctagttatatctgttcaactaggcatctactaagtatataaatgatcatggaacttactttagtgaatggataagacgtttagcaacttagcacagtgcctctcacttattaggtcttgataaatagtattgaagtcattattcctacaactcttcacagtacctggcacttggtgactaaaggaaagatacttctagtgttcagggatctcttggtccagtgatggaaactgacatgcaaacggacagtaatcaatcatgtaatgtgataagtagaataatggaagtattttctaagtactttggagcacaaaggagggggaagtaactgaccattcattcattaatagaaggcatcccagagattgttaacagttgagctaggatccaagagattcatagaagtttttctgagagagaggtagagatggacattgagggaacagacaacaaagtgagcaacaagtaaggaagtttccaggaaagaactggcatgttggggagcattgagtacttggctaggctagatggaactaagaatgctgaaaaggtgagggctgactgtgaagtcctctgtagcatagtaagatatttagactttattgttctactgggaaaaaggaaccattcatgtttttaagggggaataatgcaatctcgtttgtgttttaggacagagttttctgatggcacatgtattgggagagagagaatagcatcagggagaccagttccaaggcaattgcagttcacttgtatcagttcattttcatactgctatgaagaaatacccaagactgggtaatttattaaaacaacaacaaaaaagaggtttaatggactcgcagttcacatggctggggaggcctcacaatcatggtggaaggcaaaggcagagcaaaggcgtgtcttacgtggtggcaggcaagaaagcatatgcaggggaaccaccctttatcaacccgtcagatctcatgagacttattcactgtcgtgagaacagcatgagagaacctgccccccatgattcaattacttcccactgggtccctcccatgacatgtggggataatgggagctacaattcaagatgagatttgggtgggacatagctaaaccatatcattccacccctgactcctccagaaccttatgtcctcacatttcaaaaccaatcatgccttcccaatagtcccccaaagtcttaactcattttagcattaatttaaaagcccacagtccaaagtctcatctgaaacaaggctagtcccttctacctatgaacctgtaaaatcaaaagcaagttagttacttcttagatacaatgggggtacaggcattgggtaaatatacccattccaaatgagagaaattggccaaaacaaaggggctataggccccacgcaagtccaaaatccaataggacagtcaaatcttaaagctccgaaatgatctcctttgactccatgtctcacatccagggcatgctgatgcaagaggtgggctcccattgtcttgggcagctctactcctgtggctttacagggtatagcccacttcctggctgttttcatgggttggtgttgagtgtctgcagcttttccatgcacacagtgtaagctgtcaatagagctgccattatgggttctggaggacagtagctctcttctcacaactctactaagcagtgtcccagtggctatgtgtgggggctcacaccccatatttcccttccacactgccctagtagaggttctttgtgagggctccacccctgcagaagatttctgcctggacatccagatgtttccatacatcctctgaaatctaggtggaggttcccaaacctcaattcttgacttctgtgcacccgcaggcccaacaccacatctaagctgctaaggcttggggcttgcagtctctgaagcaaccgcctgagctgtaccttggcccctttaagccacactgggatgcagggcaccaagtcccaagactgcacgaagcagcaaggccctgggcccaggccaggaaaccgtttttccctcctaggcctctgggcacgtgatgggaggggctgctgtgaagacctctgacatgctctggcaacattttccccattgtcttggtgattaacatttggctcctcattacttacacaaatttctgcagctagcttgaatttctgctcagaaaataggattttcttttctgttacatcatcaggatgcaaattttctgaacttttatgctctggttccctttaaacataagttacaattccaaaccatatctttgtgaatacataaaagtgaatgcttttaagagcacccaagttacttcttgaatgctttgctgcctagaaatttcttctgccagataccctaaagcatctctctcaagttcaaagttccacagatctctagggcaggggcacaatgctgccagtctctttgctaaagcatagcaagaatccctttgcttcagttcccaataagttcctcatctccatctgagaccacctcagcctggactttttggtcaaaaccattcaacaggaaattccaaactttcccatgtcttcctgtcttctgagccctccaagtctctaggaaattctaaaccttcccatattttcctgtctccttttgagccctccaaactgttccagcctctgcctgctacccagttccaaagtcacttccacattttcaggtatccttatagcattatcccactctaccagtaccaatttactgtatcaggccattttcatactgctatgaagaaatacccaagactgagtaatttatttaaaaaaaaaagaggtttaatgaactaatcgcagttccgcaaggctggggaggccccacaatcatggtggaaggcaaaggcaaaggtatgtcttacatggtggcaggcaagagagcatgtgcaggggaactcccctttatcaaaccatcagacctcgtgagacttattcactgtcacgagaacagcatgagaaaacctgctcccatgattcaattacttcccaccgggtccctcccatgatgtagggattatgggagctacagttcaagatgagatttgggtggggacacaaaccatatcatcactgtgtatatgtgtgtgtgtgtgagagagagagagaatgaggatattgaagtatagagatggagatgagagattcaatttaagagatacttgtagaaataagaggagatggtcactgaatgtctagtgtgtgaggaagtgaagaattaatacaagttactgatggtgatgtcctggacctagagaagaagtcaggaaaagagttgttggaggaaggagctaatgcatattgtttgggacatatggtaggtacaattgaaccgtagttatatactgtcttgtgttgaaactttgagataattcaggtgctattctttgcttttcttggatcgtacagagattcctttcatgagaaccttcatgagagccctctggacaggcacaggccagagtagagacttgacagttaacattttagacagtaggagttgaggtggcaaggtgtactgaaatagaaacaagaaattgttaagtgtgagtaccagaggtttggctgtggggatacatctttttatttaatacttgtgttagttatctgatactatctaataatgcataacagattataaatttagtggcttatttgcatttattatctcctagttactgtaggttagggagttcgggcctggtttagctaggttttctgcttcagggtctcactaggctgcaatctaggtgttggctggggttacaatttcatcagaggcccaactggggaagattctgcttctcagctctttcaggttgttggcagaacccttacagtggtaggacagtccaccctgagctccttgagttctctgcattgtaggtttctgcttcatggtagcttgcttcttcatagccagcatgggagaaggagactctagagtaagtctgctagcaagatggagtcttatgtcccataaagtaatcgcattgcattcttgtgccatattctgctggttagaagcaagtcacaagtcccagccacactcaaggagaggggattgtaggacgtgaacaccaggaggtaggggccacagggatcacctaaagtatccaccacaagtatattttacagttcctttatatatgattttctgttttttgtttttttttgagacagagtcttgctctgtagctcaggctggagtgcagtggtgcgatctcggctcattacaacctctgcctcccaggttgaagtgattcttatgcctcagcctcctgagtagctgagattacaggcacataccatgacacctggctaatttttttttgtatttttaatagagatggggttttgccatgttgcccaggctgatgtcaaactcctgagctcaggcagtccacccgccttgtcctcccaaagtgctaggattcaggtgtgagccactgtgcccagtctatataggatttaaataaacagttggagttgggcacagtggctcatgcatgtaatcccagcattttgggaggtcaaggcaggaagatcacttgaggccaggagtttgagaccaagctgggcaacaaaaagagactccatctttacaagaaataaagccagatgtggtcccagtgggaggctgaggcaggaggatcctttgagcccaggaggtcaaagctgcaatgagccatgattgagccactgcactccagcctggtgacagagcaagaccctgtctcaacaaataaataaataaacataaatgcatgcattcatacatacaattgataaatctaatcttggccaaaaaaacccaaaacaaaataaaagaaaacaaaaaaaacacaaccccaaaagcccaaaggaacctttagtttactacatttctatacgcttagaaaaaaaatttctgaggccaggcatggtggctcatgcctgtaatcccagcactttgggaggccgaggcaggtggatcacgaggtcaggagtttgagaccagcctggccaacatggtgaaaccccatctctactgaaaatacaaaaattagctgggcgtggtggcgggtgcctgtaaacccagctacttgggaggctgaggcaggagaatcgcttgaacccaggaggcggaggttgtggtgagccgagatagtgccactgcactctagcctgggtaacagagtgagactccatctcgaaaaaaaaaaaaaaaaaaagaaaaatttctggccgtagagaggaaggtgagatagtaatcctagagcattacctgtgactctctagtacttcagatgcccctagtctcaaactggaatgcagcaccctcagtacatactaatttctctccataacctattatggacctatcattatttgattcattgaaaccctttgagcttgtactacctctagggataatggatatattacatagtggtgaagtctgggatttaatgtactcatgaccagataatgtacattgtacccatcaggtaactaattatccctcaccacacacccccaccccccgccaccctcctactcttccaagtcttccatgtatattattctacaccctatacttatgtgtacacatgaaatgattattaaaagtattataagagcatgattttttaaatgatataaaaagtataaatgcttattgtaaaaattcaaacaaaagagaaaagtgtaaataagaaaagtccaagtctcccctcataggtgaattttctatgtacatagatatggtgatagtatgggagtgtgtgtgtgtgtatagttctgcatacatagaattatactgctcttggcataacctgcttttttttttcaactgagcaatgtatacaaacaatatattgcagcttttccaaatccagtcaatatacctatgtcttcatttttagagaatgctcaatattccattcctctgtggatgacatattcccccataacttccttgttcccaaggaaaagggaactcaggcatttttgtgtcttcatttgaaagcttcctcatacctttgataattgtggttgccattccttctccctttgaaatcaggtttcttgaaaaatgaagtatttgtctccttgaaactgtgataactgtaggaagcagtttgtcacttaatttgcctcacttcgagttcacaggttgttttggtgttcagtttggctttgttttagagtggatagggaaagggcccagaaagtcagatattggtagtttttaggccactgggggatctggactcagtgactgctatagttcttttttttttttttttttttgagatggagtttcactcttgttgcccaggctggagtgcaatggcgtgatctcggctcaccacaacctccacctcctgggttcaagcgattctcctgcctcagccacctgagtagctgggattacaggcatgtgccatcacacccagctaattttgtatttttagtagagacagggtttctccaagttgatcagactggtctcaaactcccaacctcaggtgatccgtccacctcagcctcccaaagtgttgtgattacaggcatgagccattgcacccggccctattgctgtagtttttttgtctgcagagtcctcaggtcacacatggaggtggcttggcaacccggacagggagacgggggaaatgaggaattcaggcagtaaaaaaacagcaaaaaggagcatatcgaggaaacttctagagtgcctcctggggattcgcaaagtccacaatcagcctgtgccaatctgttgttctctgttgctggctgggcttggatgtagtaattctggaaagacttgcttggagaacacttgatgttatagaacaaatcacattacagtaaactattcctgttcttttatggtatcaataaactgtttctgtacttttatagcatcaaacgtttaaaataggtgggccttgagcaaaggaccagaagcctcttttgcactagaaatgtgttaatttttgttgttacttttgaaatgtcatgtggtgtgtctcagaaaatgctgatgtggcatcctgccatattccagcaataaattcagtttaccattggctaaaccaagttataacctaagccaatatgcactgaaaaagctgttgtgttagttcagactgaaaggaagaatggacccaagtacccttacataatagcttaggggatcggctttcctgcattctgccttctgttgcccaccttccttctcagttcttcatctttttccctctcctacctcccttctccctcctccttttcccctcccttcctcaccgttcttcctttttctccatcttcttccacctcacccagacaagcaggccgtgacttgattggttaatcgctgtccagtatagggagtccttaaaaggcaattttgggttcaggcactggtccagtcagttggagccagtggaacattttgttttcctggaatatatgtttgcttttctcagagggagcagtagggggcaatgtaattgctagatgcttttaatacttgaggcctatctatttaatagttaagtgaattattttggtacacttgtatattttacttggtgttttttttttttttttttttttttttgagacagtttcgctcttgttgcccaggctggagtgcaatggcacaatctcgactcacgcaacctccgcctcctgggttcaagtaattctgctgccttagcctcctgagtagctgggattacaggcatgcgccaccacgaccagctaattttgtatttttgtttagaagagatagggtttctctatgttggtcaggctggtctcgaactcccgacctcaggtgatcctcctgcctcggtctcccaaagtgctgggattacaggcgttgagccaccgtgcctggcctacttgtttttttatgtgacagaaaatgtattaaaatactctgaaagctgtaaaactatgtaatatgaagatgtcttatgaaaaatgttatatcttattgaaaccatctagtggggctaggcaccgtaatcccagcactttgggaggccaaggtgggataattgcttaaggccaggagtttgagaccagcctgggcaacatagcaagacctcatttctacaaaattaaaaaaaaaaaaaaaaaaccaggcatagtggtagggtctgtagtcctagctacttgggaggctgaggcagtaggatcacttgagtccaggaggtcaaggctgcagtgagctatgatcacaccactgcactccagcctggatgacagagcaagacctgtctctttaaaaaaaaaaaactattaaaaacaaacaaacaaaaaaccacctggtgaaataaagcctgtcttcttgtttttggaatcatgtagcaaaatgtaaatgaataagtttatgatgataagtagaacttttaaattcaatttactatttttaatgtaaattgttaggcttgtttcaaatagctttgtatgggtttttagttaatgaaaaatttccaaacgtatttctctatctcaatcaaaagggagaattaccaagatcttcatcacacaccttcatggagaccatttctttggccttcctgggctcctctgcacaatcagcctgcagagtggctccatggtgtccaaacagcctattgaaatctatggccctgtagggcttcgggactttatctggcgaaccatggaactctctcacacggagctggtcttccattatgtggttcatgaactggttcctacagcagatcaatgtcctgcagaagaactaaaagaatttgcgcatgtgaatagagcagacagtcctcccaaagaggaacaaggaagaactatcctgttagactcagaagaaaactcataccttctgtttgatgatgaacaatttgttgtaaaagcatttcgcctctttcacagaattccctcatttgggttttcagtcgtggaaaagaaacgcccaggtaaactcaatgcacagaaacttaaagaccttggtaagtgtttttttgttttttgttttttcccgccttctcatcaatagggctcctgttgactgaagctataagaaatgtcatagtaaggccaggagttgtggctcacgcctgtaatcctagcactttgggaggccgaggtgggaggatcacttgagttcgggagttcaagaccagcctgggcaacatggcgaaaccccatctctactaaaaatacaaaaagtaactgggtgtggtgtcatgtgcctgtagtcccagctacttggggggctgaggcaggaggatcacttgaacctgggaggtcaaggctgcagtaagccaagatagtgttactatactccagcttgggtgacaaagcgaaactctgtctcaaaaaaaaaaaagtgtcatagtaagcttccactcctctatcccaggcctgaaactgacaatttctccacttagtccctttgtccaaagtttgcttattaaggaaaatccatggggccaaaaaatgctatttagagcaaaacccaagtatacatttgaatcctgtcttcatctccctggatccacattcttagtctgtcttcaccttatactatcttggttggcaaggtgatttgggtggtagtggtggtggttttaggtccaggctttattttttcatgtcttccctttgatacgtgtttttgatgacatcttcggtctgagaatttttgccatcgttcttaaccttacaactgcaaccatgtgctttcagagtttacttctgtatctactttgcttactaatttaaccttgattaaattaatttggtattcaaaaccctgtgcctcaaccagttttagatatcagggttcatcgtagttgaaagcaagcatacagaggtgggcttggggcccatctaaggcttcacacctcctctatgctaagcgctaagccagcatgcatgaggggatcttttcagcacctcttgtgaggtagagtccaggtacattatatctccagtgtcactgccttcacaggcatgctgtggcagtgcctgtaaaaagcacagtggcattttgtgtgtgtttgtttttttatttatgtgatctcttcctcaactaaaacaaaatgctagataatgaggaaaagtgacttaggccaaggatatttttattacctgaaagcctgtggaaatactattatatttggaaactttaaacatgatctgtgttggaattggtggtcatactatactagtttgtaagtattgtccatagtgatgatcaggtcttactttaaattaatacgagatttaagcccactttgataaatgtggaactgcccctgtctgccaagaagactaataatgtacaattgcctgaaaaaatgctccttgatcttgtaatacaaacaatcctgctaacaatttttttattaagttactttgtaggtacttgttttgactaggtgttgattatatcttttttttttttttttttttttttgaggcagtctcactctgttgtccaggctggagtgcagtggtgtgatctcagctcgctcactgcaacttctgccccctgggttaaagcaattcttgtgccttggcctcccatatagctgggactacaggtgtgcaccactgcacctgcctcggcctcgcacaatgctaggattacaggcatgagccagtgcacccagcctgactatatcactatttaaatacactctcaaattttacccaaaggtgagcttattaaataaagcactctcaaaaactgttgtttctgtgcacagcagagaatcaagaatgttacagtgactacaataaggtcctagtgatacttaggagactaaaacttgtctgacatgtatgcatgggaaatgtttcaagtactaaggcattgctaatatcaatcaacactgaaattttaaaaatgtataaatccagttttccacaagtagtaaaacatttataacaattatggatgccttttccattagctatttgcaatgctgttaaaatagactcttgaaaagtcataaattccattcctatgatgtaatgttatctgccttcatcattaggtgttccaccaggtcctgcctatgggaagctgaaaaatggaatttctgttgttctggaaaatggggttacaatttctccccaagatgtcttaaaaaagcctattgttggaagaaaaatctgcatattgggtgactgctctggggttgtgggtgatggaggagtaaaactgtgctttgaagcagacctgttgatccacgaagcaaccctggatgatgcccagatggacaaagcaaaggagcatggccacagcacaccacagatggcagcaacatttgcaaagttgtgccgtgcaaagaggctggttctgactcacttcagtcagaggtacaaaccagttgccttggccagagaaggagaaacagatggcattgcagaactaaaaaagcaagctgaatcagtgttagatctccaagaagtgactctagcagaagattttatggtgataagcattccaatcaagaaatgaaaccagtgttcctgagtgcacactgacatgtctgtgaatatgttactgaacctatagtccagtttttttatttcttgttttagtctgaaattatttgggccctaataatcctaaaaagaatggagctgcattgatgaattggctcagtatttaaagggagcaaactttttgataataaatctttttaagagaaaaaaaacccagcatcctttttgaagtccagatttgtcaaaatgatagactattcagttatacatcttattttgtgctactaccacagatagccaatattccatgcagtcctgggcttagcttctgcccagctttattgctgctattggcaaagagcacaggactcagccctcgtggctaaaaatggtattttggcagtttgtattgaatctgtttgtgttattaacagaagagggagaaatgtcatgagacgttggacaggcaggattgatgatagcatgaccatagctttgctggaatactgaatgcagggtttggctaggtgtttattttaacattttattaaactttctatttgggtcttaacccatggttctcagctggggtgacactgctcctctagaagcaggtttgaaattatgggtatgttttcttgtcacagtgactgagtacggtggtggtagtggtggtactactactactggtatttagtcagcagggataagggatgttagctgtcctgcaaagttttggtcagtcatatacaataaagaatcatctcaccccgaaatgcaaattgcaggcccattgagatacacagcaagttagtttatactcttgatgtgaatatagtttaccaaaattagtgacataatgagtggaattactaggtaagtcaaatcctaaagagtgaatgtgttagaattgcagtgtcataccaaataacattcaaaagaaatgagccattaagtgaagcttatgaacctggaggtaaaaaatgcttatctgttaaactgaggtttcattgacgtgtccctattaataaacgttatttgccccacaatgtttcttaaaacatgctccatggaaagctagccttcagtgctgattcactcagaggagctcctcagtcaaatcagtttgggaaacacattattgctgtctgtcctcctaggagtggtgtagtgtccatcaacatactaaaaacagtattgcttcaaatgatcataaaccagtgtttgatgccagaaagacctgatcccagagtcccattctctgatatgtggtagtacctctgtgtggtctggagcaggtaacccactctctgagtttcttcagcttgttcatttcaaaaatgggaaaaacagtaagacctatgtcatagattgttaaacaagacaacatatataaggagcatagcacattgcttgaaggtgttgagaaatcctgcagtacagaggcctgtcagctctgttgaacccctttctcagtcctatttcaccaggtactacctgttaacatctcaggaacctagagagctttacagcacacatatttagaaacactgttgtagtacttactgttcaatttcctctgggttctggggcttctctggccaaattttttgactcctggctagttgtggagactccaaagtagtgatgattggctgggggcagtggctcatgcctgtaatcccagcatttggaggccaaggcaggcggattgcttgagcccaggagttccagaccagcctgcacaacatggtgaaaccccatcattacaaaaaatacaaaacttagccaggcatggtggtgtgcctgtggtccagctactcaggaggccaaggtgggagcctggggcggttgaggctgcagtaagccatgatcatgctattgcactccagcctgagcaacagagcaagaccctctctcaaaaaaaaaaaaaaaaaaaaaagcaaaaaacaatgatcaaaataggtctggttacttaagatatgatcattctgatgcagtctctagaatggtctgtcttactatagactctgcccgcaaaaagtgccaaattttgatcatgcataaagcatgccatggtttctaaattcaattcaaataagcattaattagacatctaatgtacctaaacttgtgcaagaggctaggactctaggactagaatggctcagatgagtatctctaatgcatgaagcccctgaggatagagattattatgtcttagtcactgccacatccttagaaatgtccacctagagctgagtgcagtggtgtgtgcctgtagtgccacctactcaggaggctgaggtgagaggatcacttgagtccaggggttcaagtccatagagacatagcaagactccatcttggccaggggcagtggctcacacctgtaatcccagcacttggggaggccaaggtggatggattgcttgaggtcaggagttcgagaccagcctgggcaacgtggctaaacccccgtctctactaaaattacaaagattagctaggtgtggtggtgcatggtaatgaaactagcccatttcattactgaacttaccggaaagaatttacaccacctctttggtggtgccccattcactgagtactaagtaagtgccagactttattgtgttggtagtacataaatgaatagacaaatggcaaaattccagccctaagcacacagcctagtgaaagagaccagtagataaaaagtaaatctgtagttgcttcacatgttctaatcttgtatcctgggcactcgaattttgctgttcctgagcattacttggtagctgacttgagccatgcccttagaatcaggctctataaatacatatgggctaagcctcagaggccatgggaatgtggaaacgatatgttgggtcaagtgtagagtatcagtccatgatgagaactttttctagaccctcttctgggctagaatttgttttcagtgatagagacattctaagaatttgtggagctagaattaagaaagaagtttatattggacttctcggaacctgtaatctacccaaggatttgactcttaagtggggagggtgaccatattatgtattgtgtcccaaatttatttgattactgaatcctctttttgccaaggaagatcttggaactttagaaatgccattctccatacgttgcaaaattattctatttatgttttttacctgcagaatttattgagctcatgatttccatgtctacacttaatgtattacttcctttgtcctaaactgactcaattgtaaggaatccatacatacctacttattttagattttattttattattattattattattatttgagacagagtctcattctgtattttagattttaaaaaatgcacacttgtggccaggcaccatggttcacctgtaatcccagcactttgggaggccgaggtgggcggatcacttgaggtcaggagtttgagaccagcctggccaacgtggtgaaaccccatctctacaaaaattagctgggcatggtggcgggcacctataatcccagctactcgggaggttgaggcagaagaatcgcttgaacctaggaggcggaggttgtagtgagccgagatcacaccactgcactgcctgggtgaaagagcaagactccgtcgcaagaaaaaagaagtgcatgttctaattctccaaagttgtttacacttgcccagatagaccctaaatcagctctgtttaatactcatgcctcattaatgcacttttaatgaactttgaattataaaagcagcgtatgtttggtagagaatttttttaagatgcaataaaagaagacaattattcgtaattccttcacccacagagagctgttatttctgatccagtggtccccaaactgaggggtgggtgagaattactcagggtgtgtaggtagacagcgatccttaggctctgttttcaaagacttaggctctgttttcaaacgtctggggtaatacccaagaatttgcatttttaataagcccccaaggtgattctgaggtatatgagtggcagaccatattgggagaaaaaaactgtctattctatgcgttttaaaagttttgcgtgtgtttagatattttgtatgtgcttctacctatgttggtatgtgtgtatattatacacatgtacacctgtatatttttacatgtaggctgacctcaactgtttttctcatttagcatattatgaggatttccccacggcattaagtgttctctgaaagcatgaatttaatgattttctattattgcattctatagatacagtatcacttaaccgtttttttatttggaggcagtgagattgttttccgttattataaataatactatcatgaatattcttatgcataaatccttgtatctctgagtatttccttccttagaattgatttctctgagggtgaaaatctgacttctttttggaggttctgggtaggaattgcccactggtttccatgctcttttacactcctagcagcagtgaataggagtggcctgtcttggtattctatctggagatgatacggagtatcatcagctcatgaccttgctaacgcttcttccccaagacattagtcctatgaagattattttcacctcccagtgcaaataactttgttatgtcttgcaagtaggacatattgtgatttccttgaatactcttatgccaacttaaaaatttggtagtttttactttaggggtaaaaatccttactgcttcaaatatgtccatgatagatgtacagtgaaggtacttttttactaacaaaggtataaatttatcgtgaaatgtgctggttctgtccttactgattgatggatttttcaggtaatgaatgagtcagtatttttcttacatgggaagactaaaaaggaagcgctggtaatgctctgaatgttccctcttggcaggataagaatagagcggggaggcgggtaagatcgcaaaattattttcttccttagtaggaagtaaacaatgtctaaaagtgaaaaacaaatagtactctaagcatagtatgtttttaaaaagcagaaggtggggaggagagactaccagatgaatagttaagagtggaagaaggggccagaagggtcaagggggtggggacagatggtcaggggaccgctattttttataagcctaatagtattagcactattttacattttaaaccatttgtgtgtattcatttagtttaaaaattacattaaaacacacacacagataagatgctgctctgagtaatcttaacaattgcgtgtctccccatgggtgctacaggcagttagcagctgctctcaagcctttgtaacattccagtcccattctccatactgcagtctgagtctgtgtgttttgtttttttcaaaatgcacatttgagtctcatgttccccctgcttgaaacttaatggtcatttcttacccaccttcccaatctaatcttcctctacacttctgcagccctagccacgtgggtcttctttcagtcctttgtcagggctttctgttgtcgcaaagcctttgcaaggcctgctccctctgcctggaatgctctttctcctctccccaagttaacccttcctgggccttcagatcacagccctatagccacagcctcagggaaaccttccctggcctccccactaggtagcatattactcttttttttttttttttgagatggagtctcgctctgttgccaggctagagtgcaatggtgcgatctctgctccctgcaacctccgcctcctgggttcaagcgattcttctgcctcagcctccatatagctggtactataggtgtgcactaccacgcccaactaatttttgtatttttggtagagacggggtttcaccatgttggccaagatgttcttgatctcctgaccttgtgatccgcctgcctcagcctcccaaagtgctgggaacacaggcatggtccactgcgcccggccgcatattactcttatagcacctgcatctgaccttcctggtgcttggcacttactattttcattttgcttctgtgagcgatgtttctctttcccattagcattgtaagcttcccaagagcagaactgtgtcttttgtttccctctgtgcctagcttggtgcctggaacatattaggcactcaataaatagtgttgactggttcagttttccccgtcatcctgttattcagttaatatgcagtgctttgttttcctaggaattcttcctgattaatattaaaaacaaacaaaatacccacccctagtctctgaaataaaagtgggaaggaggataatggttgtctgtgactttaatggggtgaatccttttaagtactaattttaaagctttagttttgtgtcatatgatatgcagacagaaacctagacccatgggaatgattggaaaaaagatttactctgcctaaaaagttgggatgttagcttttgcaatgtataggggaatcagaacagagaggagacagccaagccccaggcaggagtctggagccctatgcaggtaggaaaaatgggaaaacttttaagaacacagatatctgatactcaattttatgttgcctgcattgcttggaattaaatctctactttctacctaactttctttgaagtctgctagacacatatgacttggggatccctccccagccctgcacaccaccaaaagagaacaagttctaaattccatgactaggttgacctggggggagaaaggacagcagggaagagagtgagacaatccccaaactaatacagttcacaggagctgaagtcagaggtgattacatgaaccaatgtttcccagttattttcagaaaattgtgaagaggacattgaccttaacatagcccatggaatgagagtgacaggggttgagccaatttcatgtatatcttaaaggacagggtaactccaactgcaatctagacacagatatttctgtgtccttgatatgtttcaagggttaaaaggctgtcatatccagtataacaaggaagttttttggggggaagcagtacctcagtttatccaaagcaaaaaatatttccacccctaaataaagctagctgagaagcactgctgctcagatgtcaggatgctaattatacacccagcagacatcgaaggtacaaagatgaaatgcagccacgaaaaagtaaaaggggaaagacaagggatcaagttgtccagctatataaatctacctttaattgccagaaatcattcaggcagcctcaggtagagaactacacaatgtttagttcactgtcaccaaatgaaaccaaggttatctgggttgttttctacattgttatggcttccagatgtcataggcttgtctgactatatctcttgacacatcctgggctggaaatgaccttgtcactcggccttctaaagtgctgggattacggttgttgacccagacatgggtaccttagaagtacccatgtctgggtcagcaactcaaatgctgatcccaactggcttacaaagggccttcccatggaatacattttcacacagctagcagataacagggcacaatcctccccagcatgcctataccgagaggcagtatagcctagtagagtggccttcaggctaggtaatagtatccctggagatatgtaaagacttttctaaggatacacaggcatattctcatatgaaatatttcgtagagtttatcttcctgagaattattgcaatcaaagtgttttgctgtagtattgtgcattgttccagaatgaaaagcctctgggataccagtgaaagggataattggaatattgatattgaggttgaaaaaaaatgaatgattaacaccttttataagttaggtagtttccaacttgttttgaacaaaactgaaggaggatctaatctgtccaatgatagatttgtttaagcagctttatggagatataattcacatgccataaaatttggtagtttttcatatattcacagagttgtacaaccatcaccactatcaattttagaacattttcagtatcccccaaataaaccccatactcattggcactcacacccactccttcccatctcccaaacctaccatccctaggcaaccactaatctgctgtctctatagatttgcctattttggacatttcagatagatggaatcatacattatgtggtccttcgtgactggcttcttctagtataatgttttcaagatgtatccatgttgtatcaatcctttattcctttttatgaccaaataatattccattctatggatataccacattttatccattcatcagttgatccaataatagattatgaaaaatattgtctacaaaacacctgtatcagaaatgaaaaatgagatattcctacagatcttatgtttgtaagatattgctacagatcttacattagaaagataaaaaaggatattataaataactccaaagttactgaaacaacttccttaaaaaaaaaaattgccagaactgacacagaaagtaaataggactaacaagactttctatttattaaagaaattgaatttgtgataaaaaagaaaccttcttacaaaaaaaaaatcttgagggccagattagtgaatcattttaaacaattgaggaagaaatacacctttcttctccaaacacttctggaaagtagaaaaagagggaacactttccaactcattttatgagtttagcataaccttgatgccaaaatgtaaggacattaaaagaaaggaaaattacatgctagtctctatcataaaaaccctgaagaaaataattagctaattgaatccagtgaaatatgaaaggaataagacctcttcataaaaggagtttattccaggaatgcaagattcatttaacatttgaaaatcagtgttttccacttaataaaataaatgaggaaaaactgtgggacaatctccacagatacaaaacattttttgataaaatttaatagtcatttgtagtaagaactcttagcttattaagataagagataaaagccaggcgtggtggctcacgcttgtaatcccagtgctttgggaggctgaggagggcagatcacttgaggtcaggagtttgagaccagcctgaccaacatggagaaaccccatctctactaaaaaaatataaaattagctgggcgtggtggagcatgcttctaatcccagctactggggaggctgaggtaggagaatcacttgaacctgggaggcggaggttgcggtgagccgagatcacgccattgtactccagcctgggcaagaagagtgaaactccatctcaaaaaaaaaaaaaaaaaaaaaagaatgagataaaacagcaactcaaagtactgttaaaagaaaaaaaaaaaaagggataggagagacccttaatgtgcaccaccacacccagctaatttttaaaactttgtatagagatggggtctctccatgttgcccaggctggtcttgaactcctgggctcaagagatcctcccacctcagccttccaaagtgctgggattacaggcattagccactgtgcctggtcatgtactatattgctttgaaggtcttagccagaccaatatagatagatagatagatagatagatagatagatagatagatagacagaatgaagattggaatggaagaaataaaactttcatcattagcaggtgacatgattatgtacatagaaaattttaaagaataagcaaataacctgttaggataaatagatgaatttaataagattgctgaatactcagtcaatataaagaaaatcaactttatgcctacattccaacaacaaactaatagaaaatgttttaatgatatcatttacagaaggatcaaaactatcaaaaatctaggaataaatctaatgaaatatatgcaaaacctctccactgaaaactacaaaatattattcagatgaagaaaagtaaaataaatggaaaggcataccatgttaataaaccaagaatattcagtattggaaagatgtcatttatccctaaatttatctgtagtttcaatgcaacccaatcaaaataactgtaggtttttatttggatatgtttatgaagaaattgagaaactgtttctaaagtttatataggcatgcaaagaccaagaatagctaggacaatcttaaaagaagaacaaaattaaaagatttacattatcggatatcaagacttacagtaaaactgcaatcacttagtataatattgttgcaaggaggacaaatagaccaatggaatagaaagacgttcaggggaaaaaaacccacacatatttagtcacttatgacaaatatgaaatttctgtgcaacaaagaaagagttgcctttgcaataaatggagagtcaatcagatttcaataatgaaaaaattgattacattgattcctaccttaaacaatacacaaaaatcaattccaaatggattttatatataaatgtgaatttagaattttagtatatgtgctgccgaggcaagcactaaatgtgaatatagaaaagctccctttttggagtaggcaaagattactaaaacaaaatcgaagcactaagaataataaagaaaaaggtagttaaattgaatgttaaaattaggaacttctattcataaaagacactatcaagagagtgataaagcaagccacagagtagtacagcatatttacaatagctgtagttgataaaggatttgaatctagaattcaatagtagttaggtgttgctacataacaaattacccccaaaacagtgatctcataatcttggtgggtcaggaatctcggtacaacttagctgggtacttctggcacaagatctctcatgaggttgtagttaagctgccagctatagggcagtgggttcatctgaagacccaagcgagggatccactttcaagcttcctcatgtagttgtaggcagaccttggtcccttgtcacatgggtctcttcgcagggctgcctcatgacatggcagctgatttccctcatgtcaagcaacctgagatagaatgagcacccaagccacagtctttttataatttaaccttgaaagtgacatctcattacttctgccacattctattcattagaagcgaatcagtaaatccagtgcacactcaagggtaagggactgcagatagcataaataccaggaagcagggtaattggtgggccatcagaggcagcctaccaaagaatttataaagaacttttaaaagtcttgatctaggtaggagttaatatgggtgtgtttactgtgtgaaaattaatctattcagatgtgatttgggtgcttttctgaacataggttatatatctgtggaaagttgacttaacatttttgatgaaaaactctaggcagaattcttaagattcttatctcctggttattaattaaagctctaatctaggcattactatgagtggattttgcagatataattgaagtcccagttgactgtaaaactatccaagtgagcataactcaatcggggagccctttaaaagcagataatttttcatctataattccagtgctttgggaggccaaggcaggaggattgcttgaggccagaagttcgagaccagcatggccaaaatagtgagaccctgtctctattaaaaaaaaaaaaaaagattaaatgatttaacatatgtaaagcacttagaacagaaagtgctatatacagatcagacattatcactattaaacttcaaattggagcctacgatgttccctcatcattcagaggaggtttaactcctttggggttttggaaactgccctcacagtgttccaccagcccagaggctgggtaaggagtgcctccaaccttctagattgggggccagggcacattgcttttgacttgtgttaaagccacttgccacatgttgctatcggacacttgaaatgtggctagtccaaattaagatgtgctgtaagtggaaaaaagtcactagattttaaagacagtatgaaaagaagaatgtataataatagttcaatcattttttacattgattataggttgaaataatattttggacatatcaggttaaataaaagacatgactaaaattaatttcacctgtcccttttttgcagtttctaatgtgggtactagaaaatttaaaattacctatgtggctcacattatatttcaactggacagtgctgctttagacagtctttctcaatgccagcagtcagagtggtcctttaaagatacaattcagatcatgtcactactctgcttaaaaccctccagtaatatcggatctcactcaagagtaagtcaaaatccagatcgaagtctaccagttcctgtgtgatcagcctccaccccaccccctctctcaggttcagtgtaaatcaagttccaaattttgcgaaacctgaagtttacatcatgggagaaagaaagggggagatgaacatgagttcttgctaagaaaaagtacaaattatgaatttatttatttatttagagataagagtctcgctctgtccccctggcgggagtgcagtggcgtgatcttggctcactgcagcctctgcctcctgggttcaagcgattctcctgcctcagcctcccgagtagctgggattacaggctgggtaatttttgtattgttagtggagacgaggtttcaccatgttggtcaggctggtcttgaactcctgacctcaggtgatccacctgcgttggcctcccaaggtgttgggattacaggcatgagtcaccatgcccagccgaataatgagtttagaattaggtactgtgatggttagtactaggtgtccacttgaatggactgagggatgcctggatgtctggggaagcattgttcctggatatgtctgtgaaggtgttgccagaggaggttgacatttgagtccctggactgggagaggaagacccaccctcagtgtgggtgggcaccatccaatcaactgccagagtggctggaacaaagctggcagaaaaggggaagaaacaacttcctgggtcctctccggtgctctcttttcctctgcaggatgcttgcttcctctcctcctgcccttggacatcagactccaggttcttcagcctttggactctgggacctgcaccggcagcctcctggaggctctcgggccgtaggcctcagcctgagggctgcactgtcggctttcctggttttgaagctttcaaacttggaccgagccacgctcccggcttctgtttctccagcttgcagacagccagtcatgggacttcgctttataatcctgtgagccaattcttcctgataaactcctttatatatacacacatatatcctattggttctgtccctgtggagaacctaatacaggttttggtatcaggagtggttctagaggaacataattttaagcataaatttcctttgtcggttttggggtttctggagttggatatctaatctgattagacccaaatgctaaagactctatttctaatagtatggacagcactaatagtccttggcttgaactgtttagagttacgcaaaataaatgcatttgatatttctgattccctgttcctaagaggcaaggagtttagtgactctatatatgatacctttgaacatttgtggagaaccaaggaatataatgaagttggctggttgctcctaagttcactgggcaaagtgatgaacgaaaaggatgagctgagggattctatttcctggttctagatacacatacatagccaaaaagtttctcagggtgccctgggtaagaatcttctcttctgtggacaaagagctgaaattgctgaaaatcagacacaagctcttatgcaagtggctgacctgcaatggaaggttcatgctcagcttcaccaagtgtctactgtcaaagggagggctttgattgggaaagaatgggaccctgtaagttgggatgggaatatgggggactctgatgaagctagggacacctaactcctaaattctaatgagccttttttgccagaggaaatggcatccccaccccccgtagtggcaacatacttttacccacacactccagtaccagcctttccatctttaagattaaccctgcattgccccggggaaacagggatgtcctcccttgaggcagctgccaggaaagacaatgctggttctcctcaggacccatccccaccacctgtccttgcctctggactctaactggactctagttcctacaggcccttagaggtgaggttcagggtatgactcatgagaaggcatgctatgctccaaatactaatcagactttttgggggctactggatgctggctccaactactcgagttttctaatttacatgagcagaaatccagggaacaggtatgggaatggatattaagagtgtgggataatgcagccaatatcatactgaatgggcaaaaactggaagcattccctttgaaaactggcacaagacagggatgccctctctcaccactcctattcaacatagtgttggaagttctggccatggcactcaggcaggagaaagcaataaagggtattcaattaggaaaagaggaagtcaaattgtccctgtttccaaatgacatggttgtatatttagaaaacccagtcatctcagcccaaaatctccttaagctgataagcaacttcagcaaagtctcaggatacaaaatcaatgtgcaaaaatcacaagcattcctatacaccaataacagacaaacagagagccaaatcatgagtgaactcccattcacaattacttcaaaggaataaaatacctaggaatccaacttacaagtgatgtgaaggacccttcaaggagaattacaaaccactgctgaacgaaataaaagaggacacaaacaaatggaagaacattccatgctcatggataggaagaatcaatatcgtgaaaatggccatactgcccaaggtaatttatagattcaatgccatccccatcaagctacccatgactttctccacagaattggaaaaaactactttaaagttcatatggaaccaaaaaagagcctgcattgccaagacaatcctaagcaaaaagaacaaagctggaggcatcatgccacctgacttcaaactatactgcaagactacagtaaccaaaacagcatggtactggtaccaaaacagagatatagaccaatggaacagaacagagccctcagaaataataccacacatctacaactatctgatctttgacacatctgacaaaaacaagaaatggagaaaggattccctatttaataaatgatgctgggaaaactggctagccatatgtagaaagctgaaactggatcccttccttacaccttatacaaaaattaattcaagctggattaaagaattaaattttagacttaaaatcataaaaaccctagaagaaaacctaggcaataccattcaggacataggcatgggcaaggacttcatgactaaaacaccaaaagcaatggcaacaaaagccaaaattgacaaatgggatctaattaaactaaagagcttctgcacagcaaaagaaactaccatcagagtgaacaggcaacctacagaatgggagaacatttttgaaatctacccatctgacaaagggctaatatccagaatctacaaagaacttaaacaaatttacaagaaaaaaatcaaacaaccccatggaaaagtgggcgaaggacatgaacagacacttctgaaaagaagacatttatgcagccaacagacacatgaaaaaatgctcatcatcactggccatcagagaaatgcaagtcaaaaccacaatgagataccatctcacaccagttagaatggtgatcattaaaaagtcaggaaacaacaggtgctggagaggatgtggagaaacaggaacacttttacactgttggtgggactataaactagttcaaccattgtggaagacagtgtggcgattcctcaaggatctagaactagaaataccatttaacccagccatcccattactgggtatatacccaaaggattataaatcatgctgctataaagacacatgcacatgtatgtttattgcagcactattcacaatagcaaagacttggaaccaacccaaatgtccatcaatgatagactggataaagaaaatatggcacatatacactatggaatactatgcagccataaaaaaggatgagttcatgtcctttgtagagacatggatgaagctggaaatcatcattctgagcaaaccatcgcaaggacagaaaaccaaacaccatgtattctcactcataggtgggaattgaacaatgagaacacttggacacaggatggggaacatcacacactggggcctgtcatggggtgaggggaggcgggagggatagcattaggagatatacctaatgtaaatgatgagttaatgggtgcagcacaccaacatgacacatgtatgcatatgtaacaaaactgcatgttgtgcacatgtaccctagaacttaaagtataaaaaaaaaagagtgtgggataatggaggaaggaccataaagttggatcaggctgaactcattcctatgggtccactaaacagagattctgcatttaatgttgcagctcagggagttaaaaaagggttctaatagtttatttgcttggttagctgaaacatggatcgaaagatggcccactgtgagtgagctggaaatgcctgatctcccttggtttaatgtagaggaaggatcccaaggcttagagagattggaatgttagagtggatttggatttgtcagtaaggacctactcatcccaactgggagggtccagaagacacacctttcaccagttccttgtgaaatagatttgtgaagggagcaccagcatccttgaagagctctttgattgctcttctctgtatgtcagatcttacagtgggaaccacagccactcaactggaaaacttaaatgcaatgggaataattggatcctgaggtggcagaggccaagtggcagcactcaaccatcaaaggcaaggtgggcatggttagtaatggacagcagaagcaaaacagcaatcagaatagtctgaaacctatagagctctagcattggctaatttatcattgtattcctagaagtgaaatcgacaggaagcctactacattcttacttgatctgtataagcagaaaacttccaggtcaggtgaacaaaagtccaatttgaattataaaaacagagaatcatggtccttcaatcaatttccagactcaagctagtttatagacccagaaccccttgaatgaaagggaggccaggtccacttgaggaaggaccccactatactgctgaaaatttatactgttaatctttctcctaaccttcctcaaggaaacctctggccttttagcagggtaactgtgctctgaagaaataaataatcagggttttggggggctactggatactggttctgaactgtcattgattttaggggagccaaaatatcactgtggggctgggcatggtggctcacacttgtaatcccagtactttgggaggccgaggtaggcggatcacttgagttcaggagatcaagacctgcctgaccaaaatggtgaaaccccatctctactaaaaacacaaaaaattagctgggcctagtggcatgcacctgtagttccagctacttgggagggtgaggcaggagaatcacttgaatccgggaggtggaggttgcagtcagctgagattgtaccactgcactccagcctgggcgacaaacaagattccatctcaaaaaaaaaaaaaaaaaaatcattgtggccctccaattagactaggggcttataggtgtcagataattgatggagttttatctcaggtctgacttatagcgagtccagtgagtccctggatccatcctgtggtcatttctccagtgctagaatgcgtaattggaatagatattcttagtagctggcagaattcccaaattggttccctggcctgtgggatgagggctattacagtgggaaaggccaaatggaagccattaagaatgcctctacctaggaaaatagttaattaaggacttgaaacacggagggtggtgattcccaccacatccccattcaggtctcctatttggcctgtgcagaagatgtggatcttggagaatgacagtggattatcattagcttaaccaagtggcgactccaattgcagctgttatagtaaatgtggtttcattgcttgagcaaattaacacatcctctggtgcctggtatgcaactattgatctggcaaatgcccttttctccattgctgcccataaggcccaccagaagcaatttgccttcactgtcctacctcaggggtatattgacattccagctgtatgtcataatcttgttcacagaggccttgattgcttttcccttctacaagatatcacaccagttcattatattgctgacattatgctgattggacctagtgagtgagaagtagcaaccactctggccttatttggtgatacatttgcatatcgggggtgagaaataaatctgactaaaattcaggggccttctgcctcagtgaaatttctaggactccagtggtgtggggcctgttgagatattccttctaaggtgaaggataaattgttgcatctcgcctctcctacaactatgaaagaggtgcaacaacctagtgagcttatttgtattttcaaggcaacacattcctcatttgggcgtgttactctggcccatttattgagtgacacaaaaggctgctagttttgagtggaactactacctaatgataggccgattacattgaactacttccatcgtggaaggggcagcagtttatccttgggacagacagttatttccgatatggatttgactttcctgcatgcaattcttctaccaagactgccatctttgggctcacagaatgccttatccactgccatggtattccacacagcattgcttctgatgaaggaactcacttcccagccaaagaattgcagcagtgggctcatgctcatggaattcactggtcttaccgtattccctatcatcctgaagcagctggcttgatagaatggcggaatggccttttgaagttgcagttacaatgccaactaggtgacaatactttataggactgaagtcttctccagaaggctgtatatgctctgaatcagtgtctagtatatggtactgtttctcccatagccaggattcacagatccaggaatcaaggagtggaagtggaagtggcaccactcaccatcacccctagtgacccactagcaaaatgtttgcttcttgttccagtgacattatgttctgctgcctagagttcttagttccagagggagaaatgctgccaccaggagacataatacaaaagtggcttgaggagctactttaggcaactcaagcttcggagtcaacaggttaggaagtgagttacagtgttgcctggggcgatttacccagactgtcaagatgaaatcagactactactccacaatggaggaaaggaagaatgtctgcagtttaggagatcctttaggatgtctcttagtatcaccctgccctgtaattaaggtcaatgggaaactacagcaactcaatccaggcaggactacaaatggcctagacttcagaaatgaaggtttgggtcacgccactaggtaaaaaagccacaaccagctgaggtgcttccagatagcaaagggaatacagaatgggtagtagaagaaggtagttatggttagggaaaagctgccccagggaccaccgcccccccccgccacccccccccccccgcccgccctgcaatgcagctgacccttaccctgaatactctgcagctgcattcctaaacccttatctaggcgccacagcaaggtcaccagacttgctgagcaaaccctgattatagccccccgggcggcactggagaggtcaggagaaacctaggttacaccctcttgtaaattcctattttcacaagataatatactgtaagccggtcaagagatgatatgtggtaaagttaactgacaaacaatcccagagtctctctcccccatagaaacccctcattttgtaagctcagggctgcctcctgactgtggtggaacagcccggcaggttaataaacttccttgcctgaccttgggtctctctctctctctctcgtcctttctttcggctaactttacagttatcaataccagctgccactacatgacccatttcagaaacgaggactgtaattgtcatgagtattctctccttattttgttaataatacatttgtgcatatatacacttgtattaagcagatatctttgtcttttcttgttcctttatgatgtaacataagatttactgacgtcacatcagcatttaagtgttgttaattttatgtaatagtatttaagttaaggattagtgcattttcaattgtacaaaggatagttacattatgttgggtggaattatgaccttgttattgtctttatttggagataagtatgatttaagaaggtgtgtgtgagtgccaagttgacaaggggtggacttgttatggttaatagagatgtcaacctgattgaattgagggatgcctacatgactggggaagcattgtttctggttgtgtctgtgaaggtgttgccagaggagattgacatttcagttgttggactgggactcagtgtgggtgggcaccatccaatcagctgccaacagaggctggaacgaagcaggcagaagaagggggacaaagcagcttgctgagtctccttgctctctctcttcatgtgctggatgcttgcttactctcctcctatccttggacatcagactccaggttcttcagcctttgaagtctgggaaccccaccagtggctcctgggggctcttgggccttcagcctcagactaagggctgcattattggcttccctgcttttgaggcttttggacttggactgagccacactcccagcttctgtctttttccagcttgcagatggcttattgtgggacctccccttgctatcatgtgagccaattctccctgataaactcgcttttatatatacacatatcctattggctctatccctctggagaactcctaatacaggttcagaattgaatgtgaatttagattgagaaaataaatcacaacaatttattggattcttggaaattctggtccctttcttctgatctctctttaggcaaattatcacacatgcttacacagaatacctccagattgcagcctggctcccctgaccccatctagaattctccacaaccccaacaacagctgcccaggctcagggaagccttgaagctctgacctcactgcctttgacctcccctctctttctgcctccttactactcttgtttgtaccatgccagtgcccactgtacagcttttccacttgctccttcctgtgcttgaaatgttccatccccagctgtccacagagctcaccttctcatcttcaggtgtctgctcaaatgtcacctcatcaaagcaacctaccctgttctctctgtaaaaagcagcaacccccttctgcactttctattctctttaccgtgctttaattactctcataacactaccagctgacatattctgtgtttgcacatttgtttgttaattgccagtctccctcctttagaatggaaattcaggaggatagggaccgttttgtctcctgtaagtatacctggcacctaaaactaggcctggcccttgataagacacttaaaaactattggttgaatgaatgaatataagttgaataacaaggaagccttattatttttcaatatggaatcaactttttaaggaaataattcactccacattcccagcccatatcctcaattatcagttacctcagttacctactggtgtgtgacagctactattttggctacctggcatgcttccacatcattcttaccctaatcccacactccacttatccccagggataagcacacactctaggtatggccaagtggtgtgctccagatgattagtcagaaatgagctcaccacctaagcttggccaatccatgacttcctcaagatcattctcactggagttagggaagaggaagtagccccttgacatgtgtcacattattgagctagaaggctgtgaattaagggctctgagggatgtgtttttccctagcagagaaagagatggcttgaaagtcccagcagcatggagccctgggtccagtttctggagctcctctgcttcctgcagctcttcctgcagttccaggatgctggaacctaggagtttcccagcatccttccaacttccttttctgctttaacaaataccagctgagctcctgttactcatgattaaaactcctcactaatatgcaccgggcaccaggctgttcactgaggatgtagtgatgacctggacactatccttgccctcaaggaacttacaaccttcacggagaaagcagaagggaagatggtaatggcaatgcagtctgaacacatgtattggacacgggacttgccggaattcagagatctgacatgtgtcatgacactgatcagctgctttaagttcttgtgataattctaggttcaaagcaacctaaggctctaaaataatattgttggtcatcaaatcaatatatatattaactgagcacctactgtatgcaagggttaccataagtgctatgatacagacctgtagaacattctaactggggtaggttgcccttctaaaaaataataaatactaggtaagtatgaaatgaagtcataggacattctatttcttcctgtgtctttctttttttaattctttttttttttttgagatggggtcttgctctatcaccccagctggtgtgcagaggcatggtcatagcacattgcagcctccaactcctggactcaagcgatcctcctgcctcagcctctcaagtagctgagactacaggtgtgcaccaccatgcccagctaatttttttaagtagtgatgaggtcttgctatgttgcccaggctggtgttgaaatcctgggctccagccatcctcccacctcagcctcccaaaatgctgggattacagacatgagtgagtcactgtgcctggccctatctgtggctttctaaaggagcagtttagcatatggttgggagtgtgagctttggaatcccaattgtgttactagccaggtgatcttgggcaaagtcactttatctctgtgagactcagtgtcttcctgtagactggataatataactatttattttacagggttgttaggaagattaaatgagtccatttgagtaaagcagttagaatagtgcccaacacatagtaaatcctcaataaatgttagctaacaacactatgtctaaatcatataaattataaattcctcaaaagcaggagccttgcattatttgtagctctgctaacacgtacagaccactcaagatttttctagttgctcagctcagcagtattaatatattagcagatgtagcattgtcttgcttgctggtttctccatctgctctaaatttagtactaaataaagatagttgtgggggtggaggaggttttaaagatctctggtccaaatccattaggttttttgttgtgtttgaaagctgtaatccagagagagtttgaaagcatatgctaaagaccatttttaggcatgttttgcagaaatgtatagcatctatttacattattatgtgtttccatactttgactgtcaatcctttgcatatagtagtatcctaactgatgttccaaatttgctactatgctatacatgggcttgcataattcctaattcataacatatggatattaaatagattagcttatgagaagcaattcacttttttccatcttggtaagtagaatagtcacaatccaataaagataaataaagatgtctaggactaaggcatcataattacaccttatatttgtatagtgcaaaataacaccttacatttgtatacgttatttaattcttacaactactcagtgaagtaagcaggcatggaagtatcatgaattccattttatagatgaagatattagaacctagaggttttaactgacttgcctaagtttactacatggtaacaaatggcagagccaagatcatacttgggtttcttcactgctagcccagtgccctttttactttactggtagaggaaagtgttaggaatttttattttcttccaccaatatttacagcctgactctacaaagaaccttaccaatggtggtctgttgtgagccttcagcaaggtatgggtctcatatgcttaatcccaatttgtaaatgttatagagccacccccctggcaaggaggatttatatcaggcaaatgttgcagaaaacgatatttagctgcatctgctacagctgataaactttggaattgaaagacaagaaagaatcatcaatgaagtaactcaaataatgggagagaatctcccagtcaacactgaatatccttgctccttaaatttcaagctaaagatgcctataaaactccatataatataaccacagaagatattttgtaggtagtactttgcacaaaagcaatcataggagttttacagtttgtttttattggaagagagccacagctccagaatttcttgtcattgaatagatgggagggagcgggagttagaagcagaaaagagaatcagcctgaacatacagatgctggggactatgcggttggggcagaaaacgtttatactgtaaggagttagtgtgagtggtggagagagagtgactaaaatttttacacaattactatataaattctttttttttagtatatacattctgatcagactagtgtaaactggcatagacaaatatgaagcagttgatgttgtacatagaaatgggagaaaagaaagccagacaatgtaaaaaatttattcccctcccactccagataacaccccagtgtgagagttaggagtccatatatttcaagagactgaaaccaattcaatgagcttgaaaaataataagatgtattgattctcataggtcaaaaaaacagggatggtaccagcatcaaatgcaattggatctgaggctcaaaggagagtagggttttccctctctctccttctggatttctactccgttttcttgtttattatcttctttcctactgcaaatgaccttcctcgatgtagtcagagaagttgactgccagcagtggcaggccaatactccatgctggggtaccactgtcaaaccaaatcccagcacaaagaaagaaaatgtttctctgatggcttccatgtatgatgtcttagagaaggattgtgattggtcagtgtgggccacatgtctgcccgtgaaccagtctcaagctctagggcaatggagtgccaggactggccaatccttggttatgtctccacacttgtagccaaagcagatgaagtctgtcaccagaaaagtggtaaagaattcggctgagctatcccagttcactacagcaacagttcccaaattgacctgaagataaacatcccctggacccttgttaaaaaacaattatttggctcccagcttagacctccataataagaatttatataggagaaggatggtaatttgtatatttagcaagtaccgcaggtgtattagtttcctattgccactgtaacaaattaccacaaattcagtggcttaaaacaacatggatttattatggtcctggaggtcagaaacccaaaattggtttcactaggctaaagtcaaggtgttgacaggaggtttcttctggaggctctgaggggagaatccatttctttgcctttttcagcttctggtggctggctgtgtcctggtccaccatctttgaagagcatcactccagttactgcttctataatcacatcaccttctcctcaaactttgactccttctgtgctccttttataagaaccactggacattgggtccacttggataatccagcattatctccaagttcaagatcctaactcagtcacatctgcaaactcccttttgccatatgctatatggttgggacgtgtccctcaaatttcatgtgttgaaaactaaatccccaaattcatatcttgatgctatttggaggcagagatttggggaggtaattagtactagatgacgtcatcaggatggggctcctatgatgggactggtggctttataagaggaagagagacttgagtttgcatgcctgtggtcttttgccatgtgatgcccttcaccatgaaaaccctcatcagaagttgagcagatgccagtgccgtgctcttggactttccagactccagaagtgtgagaaataaatttcttttatttataaattacccagcctcaggtattctgttatagcaacagaaaacagtcaaaaacactattcaaggtaacattcacatgttccaaggtttattaggacatggacatagtggggccattatttagcctactgcaccaggtagttatttttttttgagacagagttttgctcttgttgcccaggctggagtgcagtggcgcaatcttggctcaccacaacctctgcctcctgggttcaagtgattctcctgcctcagccttccgagtagctgggattacaggcatgtgccaccatgcctggctggttttgtatttttagtagagatggggtttctccatgttggtcaggctggtctcgaactcccgacctcaggtgatccacccacctcggcctcccaaagtgctgggattacaggcgttagccactgcgcccggcctgcaccaggtaattattatcaggtaaatttgagaaacactgataaaggagttaaaaagaaattacttaggcagattgtgaaggtaagaaagtccttggtaaggtttttcttttaatgaaaagcagcccccaaatcatttcttttctaacaaagagcagcctgtaaaatcgagctgcaggcatagacaagcaagctggaagcttgcatgggtgaatgctggcagttgtgccaataggaaaaggctacctgggactaggcatgattaaaatggtagctccatatttccttctctttgctagccatgtgtacagtaagaagcagacaagatggcactggccaagtggacagcccatttgcataataagattggggtggggcaaccagccgtctccttgtgccatgtgaacatcacacctggtcgaaccaatctgtggggccttcataaatcagacaccacctcttcaagcctgcctataaaatctgctgcagtctgctgcaggccagcttttccccttcagacaatgcctctctctctcacaaaagagagctgctctcctttctctttgttttggctattaaacctctgcttccaaattcactccttgtgtgtccgtgtccttaatcttctcagcacgagacaatgaaccccaggtgtttaccccagacagtgatgctgcttcagcaccacaggaatggttagttaacaccacaagtgcaacataaatattccaaactataaatattatataagcataactaatcacttaactgcatataatatatagatgccccaattgggtggcccaaccaccatgtttttgaatgtgtcagtaactcatttcatttttattgttgagtagtgtttcattgctatggttttgaatgtctccccaaaactcatgttgaaatttaattgtcattgtgatggcattaagaggtaatgttatgttgaagcacaaaggccatcaccagatgctgctgctatactcttagtctccccagcatccagaaccgtgaaccaaataaatttctattgtttataaagtgcccagtctcaggtattccgctatagcaacgcagaatggactaaaacatccactgaatgaatttaccacaatctgttcatccattcacctatgaatggacatttggattgtttccagttttttccgggccaggtgtggtggctcacacctgtaatcccagcactgtgggaggctgaggcaggtggatcacttgaggtcaggagtttgagaccagcctggacaacatggtgaaaccccatctctactaaaaatacaaaaaattagctggatgtgctcacttgaacccaggaggcagaggctgcaataagccaagatcgtgccactgtactccagcctgggtgatagagcctctgtctcaccaaaaaaaaaaaaaaaaagaatatttatggagcctcttccacatgtattttctctcccatctcacctcctacttcactcctctcttatcctgccctaactgtgttgaccttacttctgtcatgtgaatacactgagcttagttctgcttcaggatcttaacatcagctctctccagatttttgcatagctctctccatcattcaggtccctactcaaatgtcaccctctcagagaacctctcctgattgccctatctaaaatagtactccacctcctcccccaatctaattctctatggtcttttttttttttaataaaattgcaattatcactttaatattatattatctgtttggccacatgttaatcatatgtatcacccactagaatgtaagtttgtttttttttcatttctaacttttaagttcctgggtacatgcgcagcatgtggaggtttgttacataggtaaacatgtgccatggtgatttgctgcacagatcatcccgtcacccaggtattaagcccagcatccattagctgttcttcctgatcctctccctcctctcatcccgtctcatctgacaggccccagtgcgtgtggttccatgtatccatgtgttctcatcatttatctcccacttataagtgagaacatgcagtatttaattttctgttcctgcatctgtttgctaaggataatggcctccagttccatccacgtccctgcaaaggacattatcttgttcattcttatgacagcatagaattccatggtgtatatataccacattttctttatccagtctattactgatgggcatttaggttgattccatgtctttgctattgtgaataatgcaccaacaaacatatgcatgtatgtgtctttataaagaatgtatttaataagttcgggcacagtggctcacgcctgtaatcccagcactttgggaggccaaggtgggtggatcacaaggtcaggagattgagaccatcctggccaacatggtgaaaccctgtctctactaaaaatacaaaaattagctgggcgttgtggcacgtgcctgtaatcccagctacttgggaggctgaggcaggagaatcgcttgaaccagggagtcagaggttgcagtgagctgagatcgcgccactgcagtccacccttgtgacagagcaagactttgtctcaaaaaaaaaaaaaaaaaaaaaaaaagaatgtatttaataagttctttaaggaccaggaaatttgtctcacgctgtatctccatctagagcagtgcctggcaaagagtagaaattcaataaatttttgttggatgagaattttcatttaaatcttaggaaaagaaaaatttgaacaagtgttatacctacttttatagccgaagcaactgaaggtgagacaggttcagtaacttgccaggagggcacagagatagagccaggatttgaatgcttgtccatttgacttcaaagctcatccattgtcttagcctctatctaccgtctcataatgaagtggaatgtatacacacaagactacaaaatcaagtgccagtggagtgccttgaggttgtttggatgagatcaacggaggagatggagtcatcagtaggaggggagttggcctcatgcatgagatttgtaaagatggaggcaggagacagggcaaaccttgggcctgggtctgcgattgtccaccgtggctttgtccttggctgaagaagccagttcccatcttctcctgggagagcagtgaggatggagggccagctgtagggtcaggactgtgtaagccgcattcctgggcctttgtttcaaacctaccaacaaagaacactctctggggagcttttgtggactgtggttaggcctgcagtcaggacccgcattctaactaaccagtgtagcctctggcaagtgcagagccactttgcagctccctggcaatggagatgatctgtgtactggggaaggcagctgggcccagaggggcttttgaaccacagcatttttcttaaagatgggggatgttattgttgaaccaggtaggaggtgacctgggaaccagcctccctgaaaaggaggagggagggaaacacctatgcccagggttatgtggtgctatttccttcctgattaaagatgtagatgccttggtacccgagccctggaggaggctccctcaacctgagaaagcactgtgctgcagctcatcctgggagccggctcccctgggtggtacagcacagagggaaggaagggggccgcagttcaagggcagcagctgggagaagcatgtcagaagtgccagggaagcaaaagtcggctagggaaaggaaaggggaggaaggaaaagcagagaggcagcagcagctctgggagaaagggacagcagacattagaggggcgagtgttctgggagcctcagagcagtgatggattttccatctttccttggaggaggggctgggtcttggaatcccctcccttctctgccccttacacacagtttgtcctgaggagcagacatgaggtctgtgctcacccaagcgctcacagtctccttctctcttcaatacccatctgctgggcctaattcttacctcaaaaaggtaactcttgattattcttaaaagtttaaaaaaaaatagtaactgtgattctggtctaagctaaaattatttttcctcaaggttgtctcccaagaaaaatgcttaaagaggccgggcacggtggctcatgcctgtaatcccagcactttgggaggccgaggtgggcggatcacctgaggtcaggagttcaagaccagcctggccaacacggtgaaaccccatctctactaaaaaatacaaaaattagccaggtgtggtggtgagcacctgtaatcccaagtactcaagaggctgagggaggagaattgcttgaacttgggaggtggaggttgcaatgagccgagatcatgtcattgcactccagcctgagtgacagagtgagactccctctcaaaaaaaaataaataaataaataagaaaaatgcttaaagaatatggaaataatttggtggtgtttaggtagattgttttcctcctcagagttgaaagtaacacagatattcattaacttttatcactgaaatgacaccatagcactgtagcccaggctggagtgcaatggtgcaatctcagctcagtgcaacctccacctccctggctcgagcgcttctcctgcctccaccttctgagtagctgggattacaggcacataccaccatgcctggctaatttttgtattttagcagagacgaggttttgccatgttggccaggccagtctcaaactcttgacctcaaatggtttgcctcggcctcccaaagtactgggattacaggcgtgagccaccgtgcctggcaggtttgttttggatgaacttgtcatttccagcactccctgcttgtgatgttctctcttgtacctgtgacactgaggaaaaccgttagatgccaagttcacctgagggactaaaatctgtctagatgtaagtctgatctggcgtctactgggggaagggaaagactggataaactgtgtttcagttcatatccattgccattcaattctgcattctaagatatggcaaccagtaggctcactctacatgtttattcaacggaaacgatgtccgaaaatttaactttcatcacaaagcattttaggtgggtagaatcatgactgtgaactgtctcctaaataatttagtgttccattattcccctccccagtacattttagatttaggtcctacacagttctagaccctggattctagggctttgcctctggaaccagcggtattggcctcactttgagagcttattagaaatgaagagtctccagcccaccctcaaatccaaggaatcaggatttactttttaacatgctccccaagtgatctgtgtgcatgttaaagtaggagaaatgctgctctgaggcatctgatcagcaggccctcccaggccctggcttcagggtagagctatttgggttgcagatagcaccatgccacactctgtgggcagagagttcaaattccagctctgctgtgaacctcatcacagggacaagtgacctaaaattaaaaaaaaaaaaaatcaaactcacagaaaagtcgcaagaatagtacaaagggccgggcatggtggctcatgcctgtaatcccaacactttgggaggccgagatgggtggatcacgaggtcaggagttcaagaccagcctggccaacatggtgaaaccctgtctctactcaaaataaaaaaaattagctgggcgtggcggcacacacctgtaatcccagctacttgggagactgaggcaggacaatggcttgaacccgggaggcggaggttgtggtgagccgagatcgtgccactgcactccagcctgggtgacagaccgagactccatctcaaaaaaaaaaaaaaaaaaaagaatagtacaaagaacttctgtaaatactttacctagactcaccaactattaacattttgcagtgtatactttatcatttttttcgctctacctatgtatgatgattattcctgaattcttggagagttaattgcatatactggcatgtctttaccctcaatacttcagtgtgtagctctgaaaacaaggacattttcctacataacgacaacaccagggctagaactagatggaggctaacaaggcctgagcgtgagtggcccttcaagagggcttccttcaactttgtaccctaggagcctctgttgtctcgccctagttctggcctgcatgctacagttatcaaaatcaggaaaccttactattatctaatctatagtctattatatctaatctataatctattatatacctatagtctaatctataagctattttccaatcatgtctattgtcccaataaggtccttcgtagcaaaaattttccccagattcaattcaggatcatgtatgacatttacttgtcctgtgtatttagtctcctttgatctggaacagtttttcaggctttgtcttttatgatattgacatttttgaaaattatagactagttatgttacagaatgtccctcaatatggggacaagtaactttttaatctcttaacggttcagtttcatcacttgtaaattgggaatagtccctccttcatgttgaatcaaatagatgaagacacgtaatgggcttgacacatggcaggcgcaggtggattaaacaagaagctgccactgatcaggcacttgtcagcgccatgccaagtgcttcaagtgcattgtctcatttcgtttttactgcagctctgtgagatgggctgtatttttacccctacttcacagaagaagaatctgagacttagaatcatttgtccaaggtctcatagctagtaaggagtgacatggggacttgaatcaagtcagtgagactgcaaagattattcgcttagtaacatgcttgtggtgcttgctaaaatctagctttttaaacataaaattttcctagagttcaccattttaaccatttcaaagtgtacattcagtgtctcttagtatatttacaatgttgtacaactctcagcactatccgattccacaacatttccatcacctcatgaagaaaccctgtacctcccaattcccctgacaaccaccgatctgttaatctacctctgtttctgtggctttgcatatacataaaatgaaatactactaagcaataaaaaggaactaactactgatacacagtaacattctggatctcaaaaacaacatactgagtgaaagaacccaaatacaaaagactgcacatggaaatattccatttatgtgaaattctagaaaaaatgccttaggaacagacagcatggcagtggttgcctggggacaggaacatatggttgggaggtggcactgactgcaaaggggcataagggaactttttggagggatagaggtgttctaatacttgattggtagtggtggttacacattgcatatatttgcccaaatgcatcaaattgtccactgcgtcgagtttataatatgtaaattatacctcaataagattttaaaaaaagaagaaaaaatcccaagcatatctggtcctgaatggagttcaattcatcagcacagctaccttcgttgtctggccccagatccatcttcccagcctcatctctcgcttctctgacacttgccatgggcaagcccagtgttgggcactcagagaacgtgggggaaggagaacctctatcttcagggaactcacagcctagtctgggagcagaaagaaagggcagccaactctgacacagcagggcaccattcctagaggaccactgagtcctaaaggacaggaacaagaatattccagacacagcctggattccagtcattttgaatctcaagtttgaatccagtttcaatctaatattttgaataggtaatacatttctatggctgtatactttaagccaaagagatgacagagtttattttattgcttttaggaatgtgggaatcacttgtaatatttaggttaattgatgtcaagtaattttcaggagcaactggaattattttaaaaatcactggattaaactgggtgcagtggtgcatgtctgtagtccccagctactcagaaggctgaggcaggaggatcacttgaacgcaggagtctgagtccagccaaggcaacacagcaagactccatctctaaaaaacaaaaccaaaccaaacccaaaacattgggttgacactaaaatatcatgatgctaacttgtgccaggaggtcctttacttgagggaagagcactctgtctccatccctaggatgaaaagattaaacttctatattctcctcacccttagaaagctcctattcataggaggtaaaaccattaaataaaacaaaaggaaaataaacctttcaagtctttgcctgcgcctatcagagatctatgtggaactggcagtagcttggctccctttgagtgctttggaactatggtcttcaagatttcttgcttgcttttctcctaaaagaaatttgaaaaactgtgtttttttcttccttcctttctttcctttttctttctttctctctccttccttccgtccttttttttaaaataagagatagggtctcattctgtcacttaggctagagtgcagtggcatgatcacggcccactgcagcctcaaactcctgggctcaagcaatcctctcacctcagcctcctgagtggctgggattacaggcatgagccatcacgcctggctaaaactgtttcttcttgaacttttaaaggtcatatctaaaatgtttcatcacaagtttaaataatagtaaggtttgttatttctggcgtaagtattggcattttaaaataagattgttacatcattctttaaacgtatccaaggaaatttaaagatcataatgcatctatcaaccatttaaaaaatatatgaacaagcttttctttaaagtaaattttacatcactttttttttcttatcttgtatttccattccacttacccctcaatattttaatataatattttaagctggagagtcttttattgatcaacctatcatatttccctacaaaaaaatttttttaaaaaaattcttgactgagtctgataagcttaaaaagctcattttgattgtataattttaatatctaattgatctaaacaacataaaatattacatattttggtatctattaaaattaaaggatatttttgctgaatgaaatagaattgggtcaaacctaatcctagttttcacttctatggatagaagcacaaacaccttgttcattcattcaacaaatatttattgagcacctcctacgtgtcaatagctactctaggcacttgggatacactggtaaacactacagataaatccttgccctcatggagcttacattctagcggggggtaataggcaataaacaataaacacaacacataagtaaatcatatagtatgtcagaagtgctatagtaaaacagaaagcagggtaaaggggctttgggtgtactgtgagagttaagaatgggctgtgatttttaaaaggtcaagataggcttcaatgaggtaacttttgaccaaaggaggtgagagagttggcaatgcagatatctgggggaaacatgtacaaggcagagggcacagccagtgcagaggccctaacttgggagcatggctggcatcttctagggacaagaaaagaggtcgggaaggttaggacatattggagaatgactgataggaaatgagattagagaagtaatgctcagggtggagtggtgatgctgatcttatagaaccctttagactattgtaaggatgtagatttttactctaaatgaaatgaggatcatttaatgcagggatttaagcagagtgcagatgtctgacttttttttttttttttttgagacggagtcttgctctgtcacccaggctggagtgcagtggcgcgatctccactcactgtaagctccgcctcctgggttcacgccattttcctgcctcagcctcccgagtagctgggactacaggcgcccgccaccacgcccggctaatttttttgtaatttttagtagagacagggtttcaccgggttagccaggatggtctcaatctcctgacctcgtgatctgcccgccttggcctcccaaagtgctgggattataggcgtgagccactgtgcctggccctgacttctattttaaaaggatctctctagctattatgttgggaagaggcaagcatgagaacagggagagcttttagaagatgaatccaaagatgagatgatggtggctcagaccagggagcagcagtggaggtggttagggatgctctgtggattagacatgggtgtgagaaaacgaggggaatccagaattgctggacagcactaaggatttacttgaggttcatggtgatgaaattaaagtgaaactgctcagggtttttggtctgaacaacttgaacaatagagttatcaaatgagattggaaagctagtgggttcaacaggtttgagggagaatattgctcagtttgtgacatgtttgaggatatcagaatctggagttcaggtaagagatccgagctggagatataaatttaagagttgtcatcatatatgatgatattatatatcttagatggtactgaaagtcaggagactggatgagatcacggaaatgagtatagattaaaaagagttcaagggaccaggtgcagtggctcatgcctgtaatcccagccctttgggaggctgacgcaggcagatcacttgaggtcaggagttcaagaccagcctggccagcaaggcgaaaccctgtctacggaaaaatacaaaaactagccaggtgtggtggcgggcgcctgtaatcccagctacctgggaggctgaggcagggagaattgcttgaatctgggaggcagaggttgcagtgagccgagatcatgccactgcactccagcctgggtgacagagagagactctgtctcaaaaaaataaagagttcagggaataagccccagttaaggggtctgagagaagagatggaacccagcaaagaagacagggaaggaggaaccacgaatgaaggaggaaaaccaagaggatgtggttaaaaaaagagaatcaagtgatgagctgtgtcagctgttacagataagatgagaaccgagactagatcattgggtttagccaatgtgaagttccttgttggccttcacaagagtggttttgatacggtagtaaggatgaaagcatgaatggagtttaagagaggatgggaaacctaacactcagctgatgacctaaaatacgccacatgtgtacctcgcatgtaatgattctactacatatgtatggagtcttaacatacgtatcatgcttgacatgtttttgaactttgtataaatggtattgtatgggatgtattctgctgttgcagaatgggagaagaactgcagacaaagtatagaaaactcttttagaagttttgttgtaaagggagtagagaaataggtgatagctgacagtagaaataggtcaaagagaagaatctgtaggattggaaaaatcacagctgcttgtaagcttatcagaatgacccagtagagaaatactgataaaacagaataggcggataattgctggagtgacagtgaggatcttgattaggcaagatagtactggaatctatgtcttggtgacaatactcctttagctaggagcacggcaattcaaccatgtgagggtggggaaggcaaagtagaggctggtatgtgggtgtgggtgatgctgagattctgtggaattttttctctcattgcttcaattttctaaacaaggctattaattgagaatgattgaggagaggacatgcaacttagaggacagagaacgtacaaaatccagaagattggaggcgggaagtagaattgctggacagcattaagggtctatctgaggttcatggtgatgaaattaaagtgaaggtagtcagtgtgattgtgttcttctctcgccacattcagatgcatgggtgccagcttgaatcagggttgtggctttgccaagcaagcacaacaaagggaaaaaaaggcaagggggctgagggcatgtgtaagagtgattgtgattggctgggggttgaggctgggtgacagcagatatgagggttcaagaattgttgcagttagagtactatagggagtgatctggaaaactgaggtagtgatcagggtgtgagatgtttgaaactgagataatgaagaagttgcagagtttgataaggctacggtgattatgaccatgggaggaagtggctgagttaggatatgtgcaagtttgaagttagagaaggtacaaaatctagaatgatcaaggggaggatgtgtaagttagaggacagagaaggtataaaatccagaagagtggatcagggaagtataagagaattgctgaacagcactaagggtctacctgaggttaatggtgaacagtgggagtctccagccaacagccaggaaggactgaggctatcagtcctgaggcctgcaaggaactgaatgctgccaacaaccacatgagcttggaagcagatccgctatcccagcctcactttgtagaggacccagctaagcaacgcctggactcctgacccagagaaactgtaagatcataaaattgaagcaatgaagaagatccttgagaagaagaaaaggaactgagaggccagggtactgggaagatcttataaccacctaccactaggacagaagtggcattggagtgaatgtcaggagcaaattgtgcagagatgaagcggggtgaggtcagcgatagaggtatcggacagcaagatttaaagctgccggtttagaggaggagggggatgacctggaagcaatgttgagaagcaagaaggaaacctatctcacctccaggcactaagaagctgaaggttgaaaacacagttgccggaagtagttctgtcctgtggggttcggcatcatgcaagttccccctgggctgttctctgatacagggcacttgctccacactctgggaacccagattaaccagtctgccctgtcacatagttgaaggagttgcatttatctttctggctcccaattcctttaaaattacatttgttgcagaacctccacaaggctaaataaaataaaattacatttgtgaccatcagagaactgaagaactattaactggctgttctggttttgctgagatcgggctgttgacagttcctggttgtcccacagctacccatgtcagttatctccactaacatttccaagaatctttgtaggacaatttctccacctgcaaggtctttcaagtaagaactcttctttcctttaaggcaattagcccattgccaaaaggttttactgtcttaaagctggaactatctgagatctaattccaaggacttttctacagctaagtgagatgcctcacaccagtattaggtgattcttcgtgaggacagaacagagcattttcatcttgtgtttaaagcaatttgttggcttcggctcctcaccactttctataccagtctcccattcacgtccctagtaatgcctatgccaaaaaaaaagaaaaaaaagaaaaagctgacggtgaaacctacaggtttaagggcttaaatctcaacctttgtgttaggagtaacaggagtgtgctgagagggcaagcaataaaacaagtcataccaaaaggccacattggtctctcctaagccccaatcccactccactcctgtggccagtagtccaaacagaaaataactggagaagacgaggaggtcaaggatcaggaaactaaacgttatgtgaattcaccagcaagatgtacagaacgcttgcgtttacattgtttttatggaactagcagaataaaactgatctattttaaaaatgaaaaaaaaaaaaaaacaaaagaaagaaaacacagttgccactacttgagaggtggaaggaggagcagtgtcccagggcaaagttgggtttccttaagtaaaaaggtgaagggaacctgaagggaaattctgagaagaggttgagcttacagggaatatcatttgcataaataaatacatggtgtggtagactctaaagaggccccatatgattcccacctcctggtgttcaagcttttgtgtgtttccttccccttcaatgtaggtggcgcctgtgatttgcttctggccagcaatgtatggcaaaggtgacagagtatgagtgatactgtgtatgtgatgatgttacataagattgaaaccagtgtcttgctgagactcttcccgttgctggcttcgaagaggcaagctgccatattgttagcttccctatggagagcaccacatggcaaggaacagagggggtctccagccaacagcctgcaaaggactaaggccctcagtcctgtagcctgcaaggaactgaatggtgccaacaaccacatgaacttggaagcagatcctttgttccagcctcactttgtagaggacccagctaagccatgcctggaatcctgactcagagaatctgtaagatcataaatgtttgttgttttaggcttctatatttgtggtgagattgttatacagcaataggtaactaatacagacggaatagaagaagtttagttataacaatgtctcaatttcttaaaaacttcttctgaggtatattacctaagattcacatattgatctgttaccaaatcatgttttgtaatctatcagctgacagatcttccttcagttttgttgacagaaaagatttgaaaactatctgacttgaaaaataatttaatatccattcactaaggtcatttactttctcagcatagataccgatttttgaattgtcccttttggattgctggggaggttctgcattgatcccatgcaccttagtagtgggtgagaattttgactttcttctgtaaggtgggaggacagttttgaaaggggatgctgtgtcctcagctcctttctcaagctgggcaagtttagaaaatagaatatatagcaatggaagatgtggaaatgaattcccttaaaactggtctccataaaccccaggggtaagagaacaccagtttggagctttaggggctttctggtcaaagagggaatggcccaggcggtgatgtggaggatagaatgaagcactgagtatgagtggcgaaggcgtacggtgggtgtagagattttctgggcgacgtgacctaagaaatgactttagaactggctaatcattggttttggagggactaaaagtagttcctggttggtgaaaataaatcattaatgcgttttaaatgaaaaagaaatgcatgcgtcttgtaaaaaatgtgaaataaaagaggcataaagtcaaaagcagagcctatgccttcccccaccaaacaaacaggtaacctagttaacaggtgtgtcgtaggattcgaagttcgcctccagctccgagagtgcgcctacatctcttccaacaaaatccactcacacttgcaacgcctggcaaggctcttcaatatgtgattccttgactgtcctgtgcgtctctcgagtgtaaacacctctggggctcgtgattcggggctgccagaaagagaaggaaggtgccgccagcgtctgtttcttcccgaagtgaactcctacaacctagccaccttctccccagagctgtcgactggctgttgaaggccaatttttgtgcctacgcaggtcctcaacacagaacaaaacaaaaaaacaacaaaggccgggctaatagctatttataaacacttactggacgcccactctacgccgagctctcccgcgctccttggatacttttttgcaacgagatgccaatttccccggcgaccactccctcaaacaggccttcgcctccgcccgcgctgaggcccaggcccaggtccagattcagagccgcccgccggctggcgctgccctgtaggcgcctgcgcagagcgaccctccccgtcactcggagcgggaggcgggggcagccgggagaaaggaaagctgcgggggaaaagggccaaaccctgaaattacccggatgtggtccccgcgcgcgcatgctcagtggcttctcgacaagttggcagcaacaacacggccctggtcgtcgtcgccgctgcggtaacggagcggtttgggtggcggagcctgcgttcgcgccttcccgctctcctcgggaggcccttcctgctctcccctaggctccgcggccgcccagggggtgggagcgggtgaggggagccaggcgcccagcgagagaggccccccgccgcagggcggcccgggagctcgaggcggtccggcccgcgcgggcagcggcgcggcgctgaggaggggcggcctggccgggacgcctcggggcgggggccgaggagctctccgggccgccggggaaagctacgggcccggtgcgtccgcggaccagcagcgcgggagagcggactcccctcgccaccgcccgagcccaggtaaccgcgccatgtcccctccccttcccccggccgggcccgcgcaccccgcctgtggcttccccgccccggggcgggctcccgacgacggcggcggcggcggcggcggctgggagcgcgcggaatcctctgggagggcgaccgcggcggcctgacgagccgggccgggcgggccggctgaatgccgggcggcggtgcctcgcgtccctcgggcccccagctccgcttgcagctcgtgggagaatcaagttaaactcggacgggactcctgccgcggccgccgctcctctttgttgttctcagtagtttcacggtcgccccggctgagcgcgttgggtcggctggaatgtgttgccttagggtctaagtgaaagttgtaaattgtttgtctaaatttattttctccagccaatttctgttttgtctttgtcccctactttctcttcctagtcttgtcatgccagtttacgcttctggctttgatatgtttactttttgagtactgagagtgacagcggtatgcaggacacattcttagcacctaactgaacccctccttgcccccaataaaacatgcttcctaataaaagacacagctgatcttactgttagcactgcatgtactgacagtgaaattggtgtagggtggagggcggtggctccatcacttgtcccaaactgctgttaggatttctcaaactagattttcaaagacacaagtgtgtttagttaacctgaaaggtttatttgctggtgcagaggctttaaaaagccctgttgaagattgatagctgtttcccttcaaaaacctaagtacgtttgtttttatttaaaaaaacacatttatttcccaattagtttcttaatgcatttagtttttgcaccgtagtttaaggtggaattgccagttatttaggaataataaacacaacaggataatagcggaattaccctgaattgactttctgcaaacatataatcttagctaatttttgttagtaacctttgacttttgccagaattagcatccttctagtcttagtagcagcttggttactcgggtgttttaagaagtaggttcactcctttttgctggcaaaaaccatttagtatcaaaaaaaaaaaaatgcgtaatttcgtaattagatttagaacaaggcatttgaataatttttatggtggatttcataaattacttttgccataccctgcagagactagataatatatatttcagttgaaatctaggaagttctaaaatgtaacttttttttaatgctaaggacttactctctctatattggaaagttctgatatgattagtacataatattccaaactgtaaaatgattaacatttaaaaatacggtttttaaaattagtgtttcttccataatgctgtcatgattttgtttacttaaatgggtttgttacagaacaaatgtaatagagatggaccaagcatttgtaattcggagtagctttaggtctaaagacgatggtgaattatgtaggtttaagttgttggaattaaaactaaaagcttcttttgataaaagtcgttataacattttgtgactctattaatagaagtggctttttctttgctttccaggtttttgggcgagttttaaagaagtattgcatcttcgttttttttatttttgaagtgggagtgtatgtttctgtttaggtcactgccttcattgtaaatcttgagtttagaaaaaaccaaactgcaaatctgtttttcagacttaatgaaaatttgtgccgagaaagtcactttgaaatattttggaataagttttacatgaatgattgatcttttatgatagctttgctgtttgaagcaattctccctctactaggaagcagcaaatcttacttttaaaaacctctgcttcactttcttaagctacattttagtcgagcgattgtgtgtgaattctttttctgtattccccttcagtttttctttctccccgcaaattaaggagcgagaattaacctaatttatgctgcccagtcacactccagctctcccacttggaagcagtttttttctgattgagccagtgttatagtaacatcattagacactattctaattgaggtgtgagttactgaggcctctgccagggaggttaaccctacagaatctgtagggttcattatatttaaactgcatatttcggcttgtctaaatttttgcctattttggtgaaaacatgttgttttgtcgatgtttaaacttagttcattttgtccctctctagttcatgactaccatttttttcatttttaatccagcgatttttttagagtggttctttaagcatcttgtattagccatttcaatggtcattatatatgtttggatttctcttattttgttgaactagaagaactgtgtggttacgccccaaaatttttttttgtcttaaagccatgatgaatggggtgactctgaggtgaccattaatcgcgtataaaagtaacctgactaaaatgttttcattgttttctacagttaaaggacttacaccagcataacacagcatttttttttttttttttttttgagatggaggctcgctctgttgtccaggctggagtgcagaggcgcgatctccactcactgcaaaccccgccttccgggttcaagcgattctcctgcgtcagcctcctgagtagctgggattacaggcatgtgccaccacgcttggctaatttttgtgtttttagtagagacgaggtttcgccatgttggccagactggtcttgaacaactgacctcaggtgatccgcccgccttggcctcccaaagtgctgggattacaggcgtgagcactgcgcctgtcctataacagcatttaatacagttttgtaaaatatcacattttgggcttttgtcaacagttgatgaagtctcaattgttttaaaatgagaaattcaaacagttcacaaatatatctagatatattcatttgagctacttgtagaatgatgctgtttgcatatatcaagcatatgcttgatcataagtcagatttagaatttttggattttgttttctctttctaaaatgtgtaattttggtaatgggaaatttgactgaattccagtttctcaggaacaaggtattttaggttgtgtcaccttaacactattacctggtgtaattggcatccgggaacatttgtttttaactatgagagtgaatgaaaactagggtagtgcttacatatgtaaaactaagatggtaggtagtcggattcttacaatttataaggttctcataatctaagccttgatgagttgctactgcaaattatattatagatcagataagtaccaaagaccagttgtaaagagggtctgttaacattttaatcagtttaaaattggcggtaacagtaaagaccgttcagcccaaagactgtatttcattatttatattccaaatgagaattttttgcagtttggaaaacttgtaaatgtgttgaattcatctttttattgcttttttactcccaatgtttagggcaacggtcttttcttctctcctgtctccctccctccctccctttctccctttttcttctttttcttctttttctttttttttttctgagacggagtttcgctcttgtcacccaggctagagtgcaatggtacgatttcggctcactgcaacctccacttgctgggttcaagcgattcccctgcctcagcctcccgagtagctgagattacaggcgtgcgccaccatgccaagctaatttttttgtattattagtagaggacggggtttcaccattttgggcaaggctagtcttgaactcctgacctcaggtgatccacccgcctcagcctcccaaggtgctgggattataggcatgagccaccgcgcccagcctttttttcctttttctttccatcttgctcagtgccccagcctggagtacagtgctgcaatcatagctcactgcagcctctaccacccaggctcaagcaatcccacttcagctgctgcggtagctgggactacaggcacacaccatcacacctgtctaattttttgaaaaatttttgtagagatgggggtctctctctgttgcccaggctggtcttgaactcttgggttcaagtgatcgtcccacctcgacctcccaaagtgctgggattaaaggcatgagccaccacgcctggcaagtagttttcaatcttggctgtacttttagatcccttgaggagctttacaaaatactgatacctgaattctagccccagaaattatgatttggttggtctagggtgcagccaggttagccctccgcagtgattgagtcattagggtcctctgactttttcttttgaactgtttcacttgtgttagctttacattctttaatacagtgttacacacatgtacagtgtagccatctcacacatctaacttaacgggtcttttgaaagtattgccacatttgctttgcttctgtgtctgtctctttcttttctctcccccttcctgtcacctattcctttctcctctgtttctttcttcactttcagtttatttgaactgtctggtagtaagttttaggaagctgtatttcccatgatgagaagttagtatatcatcactattttaaataggaagttgattttcttttaaagtatattctcaaatgcttacttgtactccttttggagactaattactttaagtccccaagttagcatctgaactccctgtgggcttggtctggtggctcacatctataatctcagcacttcaggaggctaaggcaagaggatcacttgagcccaggatttcaaggccagcctgggcaacaaagtgagacctcatctctaaaataaataaataaataaataaatataactcccaatgcaaattgtcttcttagggcgttaatctacttggtaaaccttacattttcaagcccccaattaactagtcacttaactggtttctgagaggcaggttgcattgggctttttctgtcagggcttaattaatacactgtgagacatttgctcagctaggccagctagctagtacttctgtagagatcatctagggcatgttcagctctccatttacatcacctgaagtagttcccaagtgctgggctatggagtagtttcatctctgtctctggaagagctatttaaaaaaataaaaatattttttcccatctgattgcaacacacatgctgcttcagaatgggaatggagtggaggaggcatgggaatctgtgttatttttaaaaagtgcctcttgattctaaaggttttgtttattttggtatgcttatccttactgctttatttatctattttttagagacaggttgcccaggatggagtgcagtaacatcatcatagccctctataaccttcaacttctgggttcaagagatcttgcctcagcctccagagtagctaggactacaggccggcaccaccacgcctggctgatttttttaaaactgttttgtagaaatgggggggcgggggtcttgctttgttgcccaggctagccaaatcttatttatgatttaaaactaggaatgctaccgaatatatatttttatagtaaggtattatttctgtatgttaatatggatgaatgtatgctactcaggtcttttcaagtcaaaatgtatttctaaatataagatgaattaaggatatttgtcagtgatattcactagtgaattctagagcatatgttatcagtagatgggcagtccttgtaaaaattgaataatctagtgaaaggatgaccggaaataatatttaatggggtaagctaagccaggaatcattgtacataaacacattaggtgtgtcttacatcataaatatgcctactaaaactagttgaaggaagaatgtgtatagatgctgaaataatgaaggggctggctaattgtaaggaaaaatgatacaacttctatataattagtctttttaatcagttgcatatactcatgatacttaatttgtaaagtaaagattgtagactagatcaatgctttgtaaaactaacagtacctcagacttccagagtgttttttaaaggtacagccccacccttgattctagttagtggagctggcctaacctgcgggggattttgatacatccccctttgaaggaataagctagatgacttgaaactctgcttcagttaaaagttttatgaaatgaggccgggtgcggtgactcacgcctgtaatctcagcactttgggaggccaaggggggtgcggattacctgaggtcaggagtttgagaccagcctgaccaacatggtgaaaccccgtctctactaaaaatacaaaaattcattgggcatggtggcacatgcctgtaatcccagctactcacatgcctgtaatcccagcttcttgggaggctgaggcaagagaattgcttgagcctgggagacagaggttgcagtgagctgagattgtgccactgcactccagcctagctgacagagcgagactgtctcaaaaaaacaaaaaaagttttataaaatgtatttttcagttatcagttattaaaattcagtttggtttccaccatcttttaaaacagtggttcccaaagtatggtccacagactcctggagatccctaggatccttatatttaaggggttcacaaaatcaaaattattttcataatgaaactgagacgttatttgccctttcactgtgaggacatttgtatgggtggtgaaggagcagtggtgggtaaactgctggcactttaaaatgactctaggcagttataccaaacatatgagtcctcattgtgttctttatagtcaaacacacataagcatttgaaaaaatgccggtttcacttaataatccccttgctgcagcagtaaaaaggtttaattttaaaaaaatctctaccttggagtatgtctttttaatagtgtgattaaatgggaagtatgcataaagcatttctgcacattgaagtacagtgttcttttctaggaaaagcacttgtgttattgagctgcaagctgaactagctgctttttagtgggacaccatttttatttttatttaacaggatgacagataagctcagatagctatttagatttgagtatttggcaggtaattccttggaaatgaataaagtgagctggccacttcgaggagaacatttatagccagtgctaaaatctgatgtttcaagtgaaaatcagatttttgggaaactcctgtcactatgacttgccagtttcttaatacttaaagacttttctgatgagatgggtggtgatattaaggaatgtgattaaaaaaaatatgttgggctgggcacgatgatgcacacccatatttctagcactgtgggaggcggaggtgggagaattgcttttggccaagagttcgagaccctgtttctacaataacatataaaaattaggtgtagtggcatgtagttctagctgctcaggagggtgaggtgagaagattgcttcagccagggagttcaaggctggattaagctaggatcgcaccactgcactcgggcctaggctacagagcgagactggggggggggggggcagtatgaggaagtgtgtcaacactgggaagatctgtgtaactcattgaaccaatattttcccaaatgaccaattcatgttacaaaatcgtgcatgggtaggcgatccgttcaaagtacaacatagacaaatggatttttatatacaccagagccaaaaagttcactgatacagtgaattccacattgcaactaacctttcagaattgccacttgagttttggtgttgaataaaagatgaatatccattgttttctgagaaggctgttaaaatactcctctcttccaattagctgtccatgtgagacacgttttcttcatgtactttaaacaaaacaacatatcatagcagattgaatgcagaagcagatatgggaatccagctgtctcctattaagctaggcattaagagaaatttgtgaagatgtaaaacagtgttactctgattcctgactttgttttagaaaattctgtttttcataagatgtttatattaacgtaatgggtttattattttaaatgaattaataaagcaaataccaaaaattttagtagttttatttatttataatatgataaatatcaatgtatatagcccgcataaaagctatttggtgtctttaataatgaagagtataaataaaggtccaacttggccaacatgacgaaaccctttctctactaaacatacaaaaattagctgggcatggtggtacatgtctgtaatcccagctacttgggaggctgaggcacgagaatcacttgaacctgggaggcggaggttgcagagagctgagaacatgcctctgcagtccagcctgggcaacagactgagactatgtctcagaaaaagaatatgaataaagggatcctgagatcagagagtttgacagctgctgttttaaagtaactatttctatgcattatcaactaaattactgattgattgaattgtttttatggtttgtactatattgctgttatttctaaggacgttagtcattcagtttctgttcagttatcagggaacatgtaagagtcagacttaagtaaaaaggggaattcattggcttggtctggagatagagctgacctcagattgctatatccagggtttcaagcagcatcaccaggactcttgactttgctttctttctgtttctcaggtagtttgcaggctaactatccccagcttcaaggaagcatgaagagggccttcccccccccacccccccacccccccaccccccgtagttccatcggaagtgctagagctatgtcacttgcctgccttgcgttctttttcatcagaaacaacactgtggccagggggtggctctggttagtctgggaattgtcccacctggccagatggggagattctccttggaaaatcagactgctgttttacaaatggagaaatacatgctggtacacaaaaactgatgtccacctatagtactttgttatttcttcttttaacagcctttaatttattaatccaaaaagggtaatttttaaataagatcatttaaactgaaggtggcataccaaaatgacatttaagacacataggtaaacaagaagcatacatctcgatttgtcctttgtcattcatcttaaaagttaaaaaaaaactttttgttgcttttattgctgtataaatgtgctcttggaagttcgccaactgccctcagtttgaagaacctcaacttgctgtctaggatttagtctttagcttgtgctgcagacagttgcactaaccgtgaacacctttttttcctgttggtaaacctaagtttagagtttattcctagtaataacattgatatattaccaggcccagcttttttctcctcccctagttaaatttaagcacttttgcgccgggcatggtggctcatacctgtaatccagcactttgggaggccaaggcgggcagatcatgaggtcaggagatcgagaccatcctggccaacgtggtgaaacttgtctctgctaataatacaaaaattagctgggcatggtgatgcgcccctgtagtcccagctactggggaggctgaggcaggagaatcgcttgaacccaggaggcagaagtggcagtgagccaagatggcaccactgcactccagcctgggccacagtgaaactctgtctcaaaaaaaaaaaaaaattttaagcacttttctcaaatattcccatagtaagtagtttattgatcactgatcaaaacacttacaacttctagaaaatacatgtttgacacatataatacagttaattcaaaagtaaactaacatctgagaaaaaatgtcaacactccttacctaaaatacatgaatttacatgagaacctctctctggccagtattcagcctgtttaattttagagagtatcttaattagtttggttatttggctttctcgtccatttattagtatacctatggtcaacgtcaggtgacagcttacaattaatagcaaggctagaggaaaaacaacaggcagataacaagaatcagctgtctcttcttgctaactctttacctctcataactcttgactgcatctaatacctgtatatgttagtgcctttcagataggcctaacttctcatctcttcaaactcaagatatctaaagctgaatttgttacatacctgcttttaaattttttaatcattgagttatctagaaatgggtcgtcttttatttgtcccccctttttcacccttcatatttcagttggttaaagactccagtcttttctacctagaaatagctcactgatttccccctcccctccttggcccattgcccatgccccagtctaggatcttaccgcttttctggtaattgtttcctaactggttttctatttccttttccaaagctgttctccaggctctcactgaagttttctaatacaaatctaatgctgttttttctcctctttctaccatgaacctactctagacaaagctcttatccgtctctgcttttcctcatcattttccttcagcctggcaaattcttattcgtatgtggtaatccattaatactattctaccaatattctgatggctgtcccctggcacatggtagtattgtgcttctttgtctccctcatccctaccttgaaattaggcatggcccagagtttcttgcattggcactgttgacattttaggctggataatttattttgcgtgttgtccagtgcattgcagggtatttagcagcaaccatggcctttagccaccagatgcccagtagtatccagttgtgaccatatattgcctccagatgttgccaagtgtcccctgagggacaaagttgcccctggttgagaactcctggcatggccttatgactttggccagtcaaacatgagcagaagtggtagcctttaaaagaagatatatgagctgtcctatcccttctcctgccatttaaggacatatgtagaaatggagcctttgtcagtctaatttctgagcgatgacagcagtgcccccagttgatctgtgatgaatgtgtattatatcctaagcagaaaataagcttttgttttaagctactgatcttttgggggttggttgtcactgcagcatagactagccaatcctgactgatacgttgtgccaagacctaggttacctatgaactttccatgctccctcatttatagtcccaaatcactttatacctacttcttttagcatttattacttatgtaataatatgtttgggtcttccagattagtagttctcagtggagtaagtactgctctttaagggatgttgtagaaatttgtggatgggtttggtggattggtggccagggatgccatcctgcaatgtgagagacagcgaataattatcttgcatcccacaagactttcagatgccccagaaattcatgtaggaggaaaatataattagcccagaacctaactctataatatatattcactttgccaggagttaaatttcttttaattcatttttttcttgcctgcctgcctccctccctccttccctccctccctccctccctccctccctctctccctctctctttctctctgttttctttctttttccttcctccctccctgcctccctcccttacttcaggctctgttacccaggctggagtgcagtggcgtgatcttggctcactgcaacctctgcctcccaggctcaagccgtcctcccacctcagccttctgagtagctgggactataggcatgtgccaccatgccccactaattttttgtattttttgtagagaggaggtctcactttgttgccaggctggtcctggcaaccgtcctttgttgccaggctggtcctgagcttaagtgatccaaccatgtcggcctcttaaagtgctgggattacaggcatgagccactgtacccggacttggttgttttgttttttatttttgagaccaaatcttactctgtcacttgggctggagtgcagtggctcagtcatagctcaccgtagccttggtctcctgggctcaagcagtcctcctgccccagcctcttgttaattcattttcttagttcaagttgtttaagagttcaccatttgggaaaatccatgttactgactgcagtgccattgtgctatttgagttgccagtataacacgtttgtcttggaaggtctgaatttgtagctgtcacatttgtaatgattctgtatataagtgctagcatctaacttctttattatacattctaacttagttggcatgcctgagtatttataggtggaagtacacattatatattaagcttttcctcctttttgttatagttagggcattgttaaattttcaaaatatgtttaagtagtttagaattttgtttcagtaaagctaaggtggtgatataaattatttgttggaaaaaaaatgggatgttggtctgagagagtccagacccactttcttactatgggcttcctgtttttgtatctgtagtgctttgtatatacagtgtttgttgaattggtcaatttatgtttcccacatttcttttatgtacgttgttgcatctaattaccacaataaatttgtgaagttgtcagggcaggtgtttccattttatagatgagagaattgagagagatgttaacattcagtcatgcggctagacctttaattagaatatataattttatttatatcgatattatgctcttgcctaccatacttccataatctagaaccatttaatgtaggaatacatctctttattcctgctagtattattttttatatgcataacttttaattatgtttcaggcacttgtggtcataggaatacaataaagagagagatgagaaagctgtttgtttaagaaagcgaggtcattatcatttgtattcaaagcaacttggtattaaaacaaactttgagataccgttaaggccccagcatagcataaattttagaaatgatgacatttgatggtgagattgtggtgaaatagttaacacttaaacattttaattgcattgtagattcatacacatcttttggaatataatatcagaaaatgacttcaaaagtgtctgcactcttctaatttgttgtaagacaattccacagaataaaaagctatggtcagtccagaaacacttgcctggtatatgtcaggaactgtgcatggtgctgggaatttctaaaatgagagtgttgttgctgttttcttggatttctaatttgtggcaacaatgtgagacagatatgtaatcaaataactaatgtgttacattgtaatttacacatgtaatttacaattaaattgtaatcgtaattgttaaattgtaatttaacgtatctttccttttccctctttcccgattcctttcctttctactgagtctcactctgttgcccaggctggggtgcagtggcacaatcataactcacagcagccttcaactcctgagctcaagcagtcctcctgcctcagcctcctgaggagctgggactacaagcccacactaccatgcctggcgaacctcctacatttttttagacagattttaatagaaaatgcagaaaaatgcgtaatgcattttaggaaaaatcttcttgtaaaactattattatttttttgagatagggtctcactgtgtcacccaggctgtagtgcagtggcacaatcacagctcaccaaggccttgacctcccaaggctcaggtgatcttccagtctcagctccccgcgtagctaggacaacaggcgtgtgccaccacacccagttaatttttttattttgagtaaagatcaggttttgccgtgttgcccaggctggtctcaaactcctgggctcaagcgatccacctgcgtcggcctcccaaagtgctgggattacaggtgtgagccaccgtgcctggccacaattaagcatgttaatatttcaacagtagcttttttactgaacactatgtatcagacacgttatgcagaatttttcctttgagcttctgtataccctccttttaatccagattcagagtaacttcattttctgactactatgaaaactggaattctaattcaaatctcttgactccaaaatctcccatgcaggttatctttggttatttggaaagtgtaccttcagcatgtgtattaatgtgggcaagtgctctaagacatatgaaaaactgcttctctgcatggggtttatgagttgagacagacatttatgtgaaagagataacaacagagggaggagcaagtcttcaatatcaggtgattgatgtacattctgaagaggctcaaaactacaacagtggcagggagaatgggaggagagatagaaaagactgaggtaaagaatcttgtaactgtaacggaatgtagggatagtgaaggaaagaggcacgtcagagatcttttgcaaagcttcccaaggctaggtaattgagtggaattgatactttaacaaaggtcttcagaagaggaagagattttggtagaatgatgagttttattaatcttgtgggaggatactttaaggattcaagtatgcagtaaaagaaaatgaaagcaagataagtctggaatgcaacttcagtgaacaaataaaatacaaacaagcacacaaagtacaggctccagtcctgctttatcttctttattcttaagctaatggccttttcctattctctgtggggtcttgggatcagataagttagttttctacctgttgaatggattctttattaatcttcagtttttgttattttaatttttttgaaaataatttaccctgctgcttttacaggtaaaatcttttgaggaatttagtgatctctttaaagaacagctgtattgagatataatttccataccataaaattcactatttgaaagtgtacaattcagtggtttttactatagtcagagttgtgcaaccatcaccattatcaatttttaggactttttcattataacaaagaaacaccatacccattagcagtcattcctcattccccttcctcccaggccctggcaaccactgatttactttctgtctctgtggatttgcctattctgtatatttcatataaatgggattatataatgtgtgaccttttgtcactgacttctttcacttagcatgtgttttcgaggcttatccatgttataatttgttagtactttattcttttttatggttgaataatatttcgttgtatggaattttatctatgcattcatcagttgatggacatttgagttgtatccattatgaacaacgctgctatgaacattcatgtacaggtttgtgtggacatgggttttcatttccctcaagtagaagtgtgaagagtagaattgctgggtcatatttactctgtttaacattttgtattaataccagactgttttccaaagtacctgtgccattttgtaatcccagcaccaaggagtgagggtccaatttctcggcttcttcaatacttactattgtctttttgatatatccatctcagtaggtatgaagtagcagctcattgtggttttgattttcatttccataatgtctaatgtcgagcatctttcatgtgcttattggccatcgtctttggagaagtgtcctttagaatccttttgttcatttctaaattggggtttttttttttttttaattggtctcttttaacaaaggtgagtgttaactgctaggtagaatttcataccaggcgatggtaaatttttcataaatattagtaatagacttttaggtttaactagtgctgatcctcataagtaatcctttaaaaaagtgctggtaagattttcctttagggtgactagtaaagtcagtaagacttgattgagcatgccactatcataatgagaagacctaactttaatatttttggaatgtcaaaaacagtgacattttaattaagtaattttatttttaaaaattatttttaatggctaatattttgtaagaattttaagtaattttcaactctgagcatcaaattttaattatgtgcattgaatctctgacttaaccagagcaatttcatcttttcccaagtagtcagatctacttcgtaaaatgtgttctgatgtgtgtcttttttttttttcttttttaggttatcctgaatacatgtctaacaattttccttgcaacgttagctgttgtttttcactgtttccaaaggatcaaaattgcttcagaaattggagacatatttgatttaaaaggaaaaacttgaacaaatggacaatatgtctattacgaatacaccaacaagtaatgatgcctgtctgagcattgtgcatagtttgatgtgccatagacaaggtggagagagtgaaacatttgcaaaaagagcaattgaaagtttggtaaagaagctgaaggagaaaaaagatgaattggattctttaataacagctataactacaaatggagctcatcctagtaaatgtgttaccatacagagaacattggatgggaggcttcaggttagtcttataagagtttttctataccctctatggtggcagatttaaaaacttgctacgtttcctttcaagctactacagggtaatttaatttgtgctccatctcttcagatactgtgcatcctgtacaaatatgcattatgggaatttctggaagaatatgcaaaagataaaatcttaaagttttttaatgttctactcagaaaaatgttcaatggagaaaatttggaaaataaaaataaaaagcagaaaacccacacttcgcaagaactacctttagcactttggtattcatttttgtagcctgttgttttcttttttttttttttcctagacggagtcttgctctgtcacccaggctggagtacagtggcgtgatcttggcccactgcaacctccacctcttgggttcaagcaatcctcctgcctcagcctcctaagtagctgggactacaggcaagtgcaaccatgcctggctaatttttgtatttttagtagagatggggtttcaccatgttggtcaggctggtcttgaaccgctgacctcaggtgatccacccgcctcagccttccagaattctggcattacaggcgtgagccactgtgcccagtcgtgttgttttcttttttgatattgtatgtacatttaaacaaccggattacacttagtccttttataatttagaaatctgatatgtttcactgttagcaaatgtttcattggtcacatttttcaggtagaacttcataatacagctcccttgcttaaataaatcttacagaaattttgtcgtagattttaaagttttatttcaagactttacacatagtttctgcaacacagtctttttgcatatttatttattttattttatttttttgagacatggtcttacttttgcccaagctggagtgcagtggtgcaaaacatggctcactgcagccttgacctactgggcttatgcagttctcctgccttagcctcctgagtagctaggactacaggcacataccaccatgcctgggtaattttttattatttgtggagacaagggtcttgccatgttgtccaggctggtcttgaactcctgggctcaagcgatcctcctgccttggcctcccaaagtgataggattacaggtgtgagccaccatgcccagtcactttttacatttttaaaacctgagcacaggccttgaaattataccaaggtttaaattctaggtctgatgtatgacatggccaagttagttattgtgaattttagttttcttatttatgaaatggggattgtaatactgagttggtaggattgtgaggattaaatcagaatatataaaagtgtcttgcataatgtgacacatgaataaatggtcgtttatttttctaggtggctggtcggaaaggatttcctcatgtgatctatgcccgtctctggaggtggcctgatcttcacaaaaatgaactaaaacatgttaaatattgtcagtatgcgtttgacttaaaatgtgatagtgtctgtgtgaatccatatcactacgaacgagttgtatcacctggaattggtaagtagactttgctttcatcctaagaaacataaagggaaaaggatctcaatagtgtttcaatttttgtaagttaaattataaatttggaagatagcccgcgactttaaataaggttaaagaatcagacatttttaatatacgtatttaaatttgaatttaggaacaaacttatattttgactgctaaaaccgagtattgtagttgatattttgcccctttagaacattgtttttgagaaataagatggaaagcattataaatttgaatacttagttatgtattgttagatagcgtttatgctacttctgaattgaaatggttcatgaacttttgtaatctttggtttaaatttacattctctgtttttaaatggaaaatactttcattgtaatgattaatgtttcatttgttttcccctttaaacaattaagatctctcaggattaacactgcagagtaatggtaggtaatctgtttcttactactttctctttgttttgtcctatcctctctgtttttttgttgacctagaattagtttgtgtgagcggcaggcagtaacattaacaagaaaataacttactgctttggaaatgtagattttgaggttaggggcatttaaaactggatttaaaactggatttaaattggctattgctctttgtatttgaactgcaatttatgaactaaagtactgtaaaaaaatatgatagaggaatgcaccaaaaacaaatataaagaatattttttgagttaagacctatttttgaagaaaatctcacagagccagtttaaatggatgttaaatacccagaatatttggtaatttggaatcacatataacatatcctttaaaaataccagtattctaattttccttcatttcagcctaacatttttatgaatgataatgttgagaatggtttaaaattgcactcttttgtattttttcagtcttgttacattttgagtaaataaatcaaggctactttaaagcatatgcccatcacagcttacctaattgtatttttaaaaagaaaaagtgttttaaggtgagaaaatgaaatgtgaatgggggtgtttttgttttttattgtaatatttgagaatggagttttattaaatctttagctctgttacttagaacttaataaactaaaatttctgtaagaactaattaatttgcagagaaactcttataaagaaccactgtcagccaggcacggtggttcacacctgtaatcccagtactttgggaggcttaagcgggtggatcacctgaggtcaggagtttgacaccagcctggccaacatggtgaaaccctgtctttactaaaaatataaaaaattagccaggcatggtggcgggtgcctgtaatcccagctactcaggaggctgaggcaggagaatcgcttgaacccgggaggtggaggttgcagtgagctgagatcacgccattgcactccagcctgggcaacgagcgaaactgtctcaaaaaaaaaaaaagtggggggaggctgggcacggtggctcactcctgtaatcgcagcactttgggaggccgaggagggcggatcacgaggtcaggagatcgagaccatcctggctaacacagtgaaaccccgtctctactaaaaacatacaaaattagccggacgtggtggtgggtgcctgtagtcccagctacttgggaagctgaggcaggagaatggtgtgaacccgggaggcagaggttgcagtgagccgagatagtggcactgcactccagcctggttgacaaagcgagactctgtctcaaaaaaaaaaaaaaaaggaaccactgtcatcttagaaaggtgtgctcttgttctggagggcagttagtagtagtttagcaccttttttgtttgtagaattttagaggtgggtcagaaatactaggtgaccttaaccaaaatttaggaagagtatgcaattctacttgtttttttttttccacctttctcccatatcactggtaatggaggaagactcactgccttgtggtgcttgttagtgattagtaggtttctgacaagtgtgggtttattattaggagctgttgtggtggtctgggaagggttgctttaagattggtgaaaactctgcttctttgctacgcagacattgatattgtatcacttctttttttttttgaaagtaaacacgtttcatatcttcaccattttccatccatgtttttggagaaaacgtttgtctcagtgggtattaaaggttgggagactgcaatgataagtgtgtctgaatctctctatggggctgtttgtgagggggttcaaattctgagtgctcatcacacacctcccctattctaaaattattgatgcactgttattgatgggattgtacgggttgatagcctttctatagtgactgtagggctgtattcagccttgtagatccccctagtggtggttttgtaaaggctgtcttcagtgtcttatttcctcagaaaacaactggtatttctcacagctccttctagatttggacaaaggaatgatacaagagcaggtaactaaaagttaagaaaatgggacagttccttcatttttgagttaaagtcttgtggtaatcatttccagcctatcttttacctttcatgaaactttctatgaccacgttgacctgtgtattcattttaacaagtatttaataagcatgtattgcctggtactgtgttaggttccagggatgcttagataataaggtatgttttgtctactcaagtgagcttatactctagtggaggagagaaaaagtaaataagagagtgataataccatgagataggtgctgtgtcctggttgctggtgatgataaagaacacagacctaaggtgggcccagtggtttcagcttttttgtcacctatagagaatatattctttgaccctcttagaacattttttttttcttttttgagacggagtttcgctcttgttgcccaggctggagtacaatggtgcgatttcggctcactgcaacctccgcctcccgagttcaagcgattctcctgcctcagcctcctgagtagctgggattacaggtgcccgccaccatgcccagcatttttttttgtttgtatttttagtagagatggggtttcaccatgttggccggctggtctcgaactcctgacctcaggcgatccacccgtctcagcctcccaaagtgctgggattacaggcatgagccactgcacccagccctcttagaacattttataatcactatatatatgtataactactctaaaaatatggttaaataataatagctaacactgggtactcgtgtgtcaggtcagactgagctaaatgatttctgagtattgtgtcatcattctcatgatacttctacatgggaggtgggattatttatactttaacagatgaagggactgctacctggagaggtgaaggaacttgcccaagaataggcaactaggaggagccggagtaatgtgtgcttgctattagatatttaaacaatggaaaaatattacaaaagactgcaaactccatgacagcagggatatttgttttgtttatggatatatcccaagtactagaacagtacctggaacagaagtgctcaagaaatattttttcagtgaatgaatttgttgaatgctagcccataaagagaaatatttaacagtttggtatctgtttttctggactttaaaaaatatatactatatgtttttttaattttatttttttgaataggcaatacatggtccataaatcaaaatactataaaaaggtatacagtgaaaagaagtgctcccacccctgcccccattcccccctacctcaggtaatcactttttttagtttctggtgtttccttccagggtttctatatgcaaaaaatacatacctcctttcttacacaaaacgtatactatgcatactgttctggaccttggttttttacttacagtatatgattttttaaacatgcatatgatcatagtgtacaatagtgctttgtaacttgctttgattctcttggcaaaaatatattgcagacttctatccttgttgatacctttagttttacctgagaaacatttattatggattatctggggttaaagagatctgtagaccagtagaagtttcaaacttacatttgggaagtttagccagcatatttagggcaagaaagatttatgggtcataactgtttaaaagcagaatacagttggtacataaagatgttatgattgctgattaaactgaagagtcatctgaaaagcaaaagcagtgagtaccaagttgaccagttgtatcctcaaatcagctagcaaaaccagtaagttggtaaaaagatcccagtcattataacaacaaaaaaaacctaaaatgtccaggaattaattagagatgtcaggatttatatgaagaaaatcattgaactttgttgaagggtgtaatataaggctgaataagtgtagacataccaattttgtgccccaaacaatttttttctttttattatttttataacttggccaatgttgatgagtggttgtgttcagttttttttattgatacataatttgttacgcatccttttgattatctttttgtttccataaaatttctaaagaggaactttggaatgggatttataggtcttcagaatatcatcttcatgacttttgatgcatgaacatacttcttaagaggtttttaagaggttgtacatagaaacttgcacaatggatgattattactgccttaaactagtctcaatttaataaaaagtacccatgtaacttaactgatatttacatgtagtagattttttttcaaaggttgacatagggaaagataagggaaatgatatgctggttcttaatgaaaaagggaatgtctttttgtggtctactaattgactgctttaagaagagaacctactgttagttcagtggattgttaagttctggagtagtgttagtttagaagcaataaaggattggttgctaaaggtaaaaagcaaaccttaaaacaataacctaaaaacaaatgggaaggttctgggcagagaattaacattgttaatgcagttcagtttcagttttctttttgtcatacagcagagctaactatttcctggttggttaatggaaagatgttatgctgtatcagctggaatctagctttgcttatgaaggtgtaatcacataggtgaaagatgttgattactgagttttctcacaccatatattaatcaaatactcttatttgggttgggtttctagagggaaatttcagtttgacttttcatttataatttttccgtttggttctaaacctataggggacattacattcagtacacttcatttttaaagaatatgttgcttaacaataattctagatcctgggattggatatctatcagatcccactcatatctccacagtgtgaaattaacaaaaagatatagttaaatactcagtctctatttagaccgaataattgtttttctcagctggacacattttccagccattcggtttttgcctgccttatgtatttaggtgattattcttctaggtttatcaagaaactgaggagtacctttttaggattgttgctggaggctgttgaaacatagactagcttcaaatttgagagtcagattgattgataaaatatatctcatgctgttaccgctgaataaatgacttttgctggtaaagtagtatgcttttaaaataatatgaaaaaattctgaattaaggttagtaatttacactgtaattgattttaggtgttattatattacttgctaataagatttttttttctgggaatagaagcttataaaaatttaaaatatgtttaattttctatatagctccatcaagtatgatggtgaaggatgaatatgtgcatgactttgagggacagccatcgttgtccactgaaggacattcaattcaaaccatccagcatccaccaagtaatcgtgcatcgacagagacatacagcaccccagctctgttagccccatctgagtctaatgctaccagcactgccaactttcccaacattcctgtggcttccacaagtgagttctagaatcagatgtagtcagcaagttgagttttcctaatcattgcttatttatgtgtagtcacttggggggaaactccaagtaagtaaacattaaaagtaactgtagtatctttcataggtaaacaggtattaaacaggtatgcacaatcacttggaatttaagtaatggctttgattataatattgatttaaattaatgatctgatttatactttactattacatgtagcagtaagtagcctcttaagctcccagatatattttggagaaatatttaaataattaacaagtagttttgatccaagatgtttatgaaggtctgtgttaatggaattgcaacctttcttttaatgcggtgttcttattttggtttttctgggacaatattaccttatagtagttgtctgattttctcactgtgcaaagggatcttgacaaatttgttatatattgctcaagatagacattaattaagtcaattttgatataagctaacttctatatctctttttaaaatatatgtgtaattaaaaaaaaaaagtgtttcagaaagatccttcttttctgccatgtcataggagggagaggggctgctaggttcaggtttttgggggcatgatcatatgacctggttctgttacttattttcacagtaaccaaaggtttgatagtttgctgcttggcaaatgaagtagcttttttttcattttttttttttcaattaatcatagagcattgtcttggcatgtgtatggtgttagttgcatgcagttgctaaaggaatttatgtaaacccacatcagaatagatttttgacagctctgggctaatactgtgttagttgctaccgaaagtaccattattgtatttgctttactatcagattagattcaacatagaaattttgatctttggaataaatgggggactgatttctgtaattgtgagttttcaagtgaagtataccagaatttcccctttaattcattacaccacttcaaagcaacatgtttttggtttgctatctaagagatgacagtctcactataggcagcatattctaaatgggtcatataggttaagcacttgagaacccagttccttaatcacttggtgcttctattatctgtctactttttatttaccaaattaggaatatggttgacaaacagtgggtagtgatagaaaataaaagaaggtacattatagccacttgaacgtagattagtgctagagcacagctacctacttctgtttatattatctggagattgaatttctgtgcctttgtcaatgcttactaaagtgacttcattttgactgtgttgtttcctgaggttgaatcctattcaaagattagaaaaagtgatagaaatgaaatgcagctaattttatcctggtatttattgggtagattttaataatcgaataccgtaaatactgtaagttttagaacttgtgtcaaaatgttcccttatgtggtggcatgcgcctgtagtcccagctgctccgggggctgaggcaggagaaatggcgtgaacccgggaggcggagcttgcagtgagcagagagcgagtcactgcactccagcctgggcgacacagcgagactccatctccaaaaaaaaaaaaaaaaaaaaaaaagagggttcccttaggtctcaaaaagtatattgatgaaaagaagttgaactaaaatagaagatttgaaaggctattttacgtgagctgatttagtcgtattgtttaactttattttacatacttagaattgtataagggaagtattcagtatggataactacagtgagtcactttacaatttatgttcttttgacacctgaatattttaagaatttccttttaaatacctgtaaattaaaataatttatcctgtgtagttaatgacaatttttgtaagttagctaagagtattgcctgtagaattgttaaaaatatgaacaaaaccataattaacctttaaagataacttgcagaatctgggggatgagtaggaagggaggttgctaaaatgtcatttttacagataaataatttggggagtattgaaatattctctttagcttttggttttgtaattcttagctttaaggaaatgtgatatgtaaagaaaagaaaaatattccttttctttgatactttgagcaatggtgacatgttactctcttccatctgattatactcccatttagaaaagaatgaggtgatgccagttataaataattataactttagtgctttccaaataggattaacagtcgagttaattaatgctctttaagaaaccaaatttccactttaaaaaaaaagccttaaaaatgtaggacagtaagcaatatcataggatggtttttgaatagaatacaagccaagagaagcttgattctcttggtatattacatacagagagggcaattaatttcttgtacatctgggaatatgatggtgttcttgaaaagaaatgattcttggtttataaaagctcttgaaaaaatttgaaagtagactgatagtttttttgtttgtttttaaccagtaaatggtatattgattggacagcagagctagatctttttaacttcctcatcttcactatcacatcctatttaaaataattttctgctctgcttttctctgtcaaaccctagcattctgccattactagtatcagtgctgatagtgattaatttttcagttttcaacattttcttgagcctggatttttggggtcctaatcagaaaggtccagagagagaggtggatggagtggccaggatgaactgacatacctctgaagaagttaatatgataggccagacgtacagtggtgttttgctggcatttgaaatatgtttgtgaagaaataagccactacaattagttagacattacctaaaatggaataattttgagcttcctcaagttaaagtttgcctttatagatgactgtaggttttttacctgataggccatgggtgagttacactttttgcccatctttatagttgtgcattatcagataaaattggtccttcatttagtatatgaaatcataagatgacatctatgaatgtaccatgttaatgtcttcttgttcctctaggtcagcctgccagtatactggggggcagccatagtgaaggactgttgcagatagcatcagggcctcagccaggacagcagcagaatggatttactggtcagccagctacttaccatcatagtatgtacatactttaaaaaatcttttaaatagttgagaaaaaagtaggcagcctttataaaagcaaattaacccatgtgggccttaatttttagacagcactaccacctggactggaagtaggactgcaccatacacacctaatttgcctcaccaccaaaacggccatcttcagcaccacccgcctatgccgccccatcccggacattactgtaagctcttgtttttgttgtaagggctattttttttttttttttggtagggctttgttttctgttttttaaaaatgtttttacatcttttattcatcctgtgattttgtttcattaaatagtgcttttcagtattttttgtaaacagtattatttttcatagttatcctacctttttattttagaggagtgatgtttgctaaatacatttatttctctgttgctaatgtttcattaacatcacattgatttccattcatttgtttgtttgctttgtatatgttcttagatctcatctgtgtcttgtatatccacgcataatggattgaaaccctttgagtgctaagttctcaaggtttccctcagcgtagtattcagtgtactttggataatgttgaatctatagataactctgtgctggcatgattgggaggaataccctacagataacatgtagtttcaggtagaataggagcattgttcatatggcttagtaaaatcgagagtataactcttatatacattaaatccctttcttctcattataatattaatagtaccaaagaaaacttagaaaatatagaaaagtataaataagaaaagcaaaattaccctgaatcctgctactcaaaaacagccacttctaatattttgttattttccttccagtcatataaacaggtatatgtaaattgacaggggctcctactctatgtgtattgtatatatcttgcttcttttcagttatgttactattttttccatttcttaagagaatgtaatttttaatggctgcctaggccgtcatagtgttgaagggtgctgggtttggacctttaacaggctgtgtgaccattgacaagttatttcacctcattaagcctcaagagtaataatagtagtatctacctcaaggggtgttcgtaagaagtaaacgtaataatttatgtgaggtgtttagcacagtgttttaacacattaccagttttcaattatgttagctatgattccattaaataaacatccttaattaacataagcacttgtttttagaatagacctaacagtttattattatacattgcattataaattgtactgtattggacgttacatgaataattcatttatgatctgtattaaatgttggatataaaattatgtgtaaattgtgtaataatagcacttggcagatagcactgaaatgttagttattaaatatccacaaaagtattaatagtttaagactatttgcttattgtaaacttttaagttcttagacattgcataagcttgttttaaacaattcctaacctataatagttatatttaagtaagatttactgaaagttttagcattagacaacttttagtaaataaaaatggaatttttgttgtcttttctttagggcctgttcacaatgagcttgcattccagcctcccatttccaatcatcctggtaagtgtatttcaaaattgatttcctgtatttagattgatttagtggtgattgaaacgcacaaacacaggctttaatggaattatggggtcacttctcagatgagtacaatactcatcatgacatgagttaatcaacagtttgagtagtcaatatagtcacacatagactgtctatattttattcagtttaactgtccccaaaagaaaagaactatcttttcagctaaaatgagaattacagaaatgctgacttcagcattgaatacataaatatgcagcagaataaaactaggtttcaaaatagaacagctgtaaaactatagcttaaaaagccaggaaagaatcttaagtacatgccgaaaagaaaaataattcactctattcaggatctctggttaactggaatttagaaactatttgattaaattgtatgcaaaagagtaaatcgctaagtagctttcttcagttcaaagtttgtgtataatttttgaaactgtagaggtaataaaacagaaaacacttgaaaataaaatactgaaagtcccttgtaacacaaacatagattttgaatttttttctcatcctttcgtatctgtttttcttagcataaaaagatgcaaatatattacttcagctaatcaccttaattttttggaaactataaactcaattttcctcctaattaaaagaaaattatgaagaattatatttttatttttacttgtttatttttgagagagggcctggctctgttgcccaaactggagtgcagtggcatgatctcagattactacagccttgacctcctagtctcaagcgatcctctcacctcagcttctagagtagctgggactataggcaagggccaccatgcctggctaatgtttgtattttagtagataacagggtctcaccatgttgcccaggctggtctcgaactcctgggctaaagcagtcctcctgctaataattttatttatttatttatttatttatttttttccgagatgggatctcgctatgttgtccaggctggtttcgaactcctagcctcaagtgatcctcctgtcttagcctcccaaagtgctgggattatagacgtgagccaccacaccaagcttgaaaaattaaaaaaatatatttttaaatgattttatttttgatctttgtgggtacataggagatgtatatatttatggggcacatgagatgttttgatacaggcatataatgcatgataatcacatcatggaagatggggtatacatcccttcaagcatttatcttttgtgttacaatctatactctgttagttattttaaagtgtacaattaaattattggctacagtcaccctgttgtgctgtaaaatattagaccttattcattctaactactttttgtactattaaccatcctcaccttcccccaatcccccactacctttcccagcctctggtaaccatccttctactctctgtctctatgggttcaattgttttgatttttagatcccacagataagaacatgtgatgtttgtctttctttgcctgggttctttcacttaacataatacctccagttctatccatgttgtctcaagtgactgaatcgcattttttttatggctgaatagtactccactgtgtataagtcaagcataaagaattttaagcataccggaataatacaggaagttcccccattgtactcattcctcagtttcagccattatcaagtaatgaccaatcttgtttcattcatactcactctctttcttcattctatattattttgaagcaaatcctatattagttttatatgtaaatatcttagtatatatttccagtaaaggtttttaaaacataaacacagcgcccataatgattaattcaaagggtcttaaattcttaaataggtctacataattttctttgtgtaaatgttctgttattgattatgttggtttaatttttcttctagctgtttaaaaaaatagaagggaacatctttgtgtttataacttttctcatattttagtttaagaaatttgtagaatttctagatcaaaaggccatattacagtgacaccagagtgtgagaaccagggttactgtgctggctagcagtagatgtcatagtttaataaactttttgctgatttaagaggcaaatacttgttctggttaggaaaaaggtgatattagtggggcagaagcattcttttaacgatatatatttattatcttctgtaacggattttctgtgttacattgtgtgttgtgattttaaacatttttgtaggtcaaggggtctagccttttcataaactttctttttttgagaaatgtaatatacagaaaagtatgtaacacaagtaagtatatagtctaacatcactaaaaccaatactcatgtaaccactacacagattgagaactaaaacattatggcatcccagaaaccctcctaccccatgaattttgtctctgtcaaaacctctttccttctccccagaggtagctactgtcctgctttttatggatatcactttttttttgctcttttatttattttttaaatttttatttatttattttgagatgaactcttgttctgtcacccaggctagagtgcagtcatgcaattcggctcactgcaacctccacctccaggttcaagccattctcctgcctcagcctcccgagtagctgggattataggcacccgccaccatgcctggctaatttttgtattgttagtagagatagggtttcaccatgttatccaggctggtcttgaactcttggcctcaagtgatctctgccccatcggctcccaaaatgctgggattacaggcatgagccaccatgcctggcccttttaaagtgatgaatacatccctaaacagtctagtaatctggctttacttgttttttttttttttttttttttttgagacggagtctcgctctgtcacccaggctggagtgcagtggcgcgacttggctcactgcaacctctgcctcccgggttcacaccattctgcctcagcctcccaagtagctgggactataggcgcccgccaccacgcccggctaatttttgtatttttagtagagacggggtttcactatgttggtcaggctggtctcgaactcctgacctcttgatctgcccgcctcggcctcccaaagtgctgggattacaggcgtgatctaccgtgcctggccctcattttctttttacctagctttataaatacttgtttaaaacaatttaacatttggactgattgtgtaaagaccacttttaagtgttgttactgttttttgttgtgttttttttggccaccaaaacattgggtaattgttgtcttagacaatctctgtagttttggtttaaccagtgtacctatcagttgtttgctgaagcttcttgtccatagcataatgtgataccttcacattacattttctatagacaatatatatatatttttttaaatttttgagacggggtctcactctgtggcctgggctggagtgcagtggcactctcatggcccactgcagccctgacctcccagacttaggtgattctcccatctcagcctcccgtgtagctgggactacaggtggacacaaccacgcccagccaatttttctatttttcgtagagacgcggtttcaccatgttgcccaggctggccttgacctcctgggctcaagtgatctgcctatcttggcctcccaaagtgctgggattataggcatgagccaccatgcccggctgaaaataatttcataaatacttcaaaactggctttttaagaagacactcagtgaagacacttagtgtatcactggtttttatgttctaagcataatgaaatatatgtaaacaaatatttatctttgtgacaagttcattagagtgacatggcaaaacatttgagtttttaagtttttgaattatccaatcttcatgtgatctgttttgataactcctcattgcattggaaagtattttattgcttggcagcattttgaaaagtaattagggtacatagcttttacaagttgttttcttttaaaaaaattttaagcatcaatcatacttcattttaggttattttttttttttccgtaagatctgggtttcttttttgtcattctaagtaactttgttgaaagtaagattgttgaaagttttattgcttcaaattctagtttaaagttcataaacagcttattgagatacagataaatctttcttttaaatatgtcgaacctatttccaccctggggtctttgctttcgcttcctctttgaaatctgttcagtcttcacatagataaaaggttattcaggtcccatcttttcagatgggatgtcccctaccatccagtctgaagtgttcttcccaatcatctgctgttccataccctgttttattttcttcacagtgttcattgttatctgagttatttcatttgtttgcttatttgtctgcccctgcacctctgtgagaacagggactgtagctgttttgttttctactgtgtatgcagtgcctagaaagatccctagatactctgtagatatctgttaaatgagttaaaacaggaaagccaaataatttttatgtatttgggcttgatgtaataattgttgtttacaaataaaaattagaaatacttgatcagttgtctttgtaaaccagagtagcacctcttttttcccagtgatttaaaattatatattattgttcaaatgagtacactaaatacatctccaaagttaaaattgtggtagttaacatgacctgacttcactaaaaataccttttgctatggcataggtgggacaaatgaccttctacccaagagacagttgagaatctgtgtgtacaacaactgtgtgattagagtataattaaccttaactcagggatgggatagctgacttgcttatgcactttctctcaattagggaatctataaaaatatgtcatgagtcgatgttattcaaggacagttccctggaatacatcttagggtcagtgtgtttttaaaaaataaaagttgagactacatagagaatatgtgtagtcaaatgaaataccatggtaaaataatttattttagattctgattatttctgttctttaaattctcagttgacctggtcctttgaggtaagaaccaaattccagattttaaaaaatgacttttagaacttgaggataagtggtaattggaaattaaaaaaaaaaattagtgttttaagaacagtgctaagtactgagctagaaaatagaagacatggaaattcctaccttttaatgcattatgttattttaatccagttgttttgggtgcattacatttccatctcccctccctttaccctttcttttaggaaaaactgtgttgtggagtgcaagtgaaagccttatatctttctcatgggaggatgttctttcccatttatttcctatagctcctgagtattggtgttccattgcttactttgaaatggatgttcaggtaggagagacatttaaggttccttcaagctgccctattgttactgttgatggatacgtggacccttctggaggagatcgcttttgtttgggtcaactctccaatgtccacaggacagaagccattgagagagcaaggtattgattgtatagtcagatagttactttaaaaaattgagcatagtacattgtcttttattcaaggttatgttttcccatgtacattatatgtgttcttaaatataaataaaggaataaaggtcatgttgaaaactcagaatttgtaagcactccatcttaattgtcggtgtttttgttgtttaacatataatgataaaagatagccttttttatgttagtaggtttctatgtttcgaatagtaagtataccttttgaaattcagtttgaaaattttattttctgtgatcatacatttctacaaattactgaaaggaagtaatattaaatgagaacatgtttctgaaagttttacttataatgttaaaaaaattggtaataaaagggaaatggttaagtaaattatgataaatttttccttttttatacagtcattaaaatgtttaaaagtttatataatgaggctgggtgcggtggctcacacctataatcccagcactttgggaggcggagtcaggcagatcacttgaggtcaggagttcgagaccagcctggccaacatggtgaaaccctgtctctaccaaaaattagccatatgtggtggtgtccacctgtaatcccagctactcaggaggctgagacaggagaattgcttgaacccaggaggtggaggttgcagtgagctgagatcgtgccactgcaccccagcctgggtgacagagtgagactccatttcaaaaaaaaaaaaaaaaaaagtttatataatgaaatggaaatgcttacagtgaaatattacaggaacattccattttagctactgtatgatctcggcttttaaggatgtgtgtgctaaagaacataatcttggctctatcacttgctgtcatgtgactttggcaaattacctaacctctaagccattctgcctaatagaattttctgtgatgaagaaaatgatttatatttgcactgtccagttcggtagccactagccacatgtaactattgagcacttaaattatagctcacttgattgactaatcggatttctaattagttttaatttaatttaaatagtcacatgtggctagtggctatcaatttggacagtatgccttagtttctttatctaaaaaaattagaataatagtacttattgagttgtaagggtttaatgagaattcatactacatgctcctgacacatagtaagtgttgtaaatatgtgcatcattattagatatgaacaggaaaagaaaaaaggaaatatacaaaaatgttaatagctatcttttggttttatgtgatctttatttttaatttttcaatattaagcatgctatacaatctgaactaaaatttaatttaaaatacttatcaagataaaatgtaatttcttttttcttcctaaggttgcacataggcaaaggtgtgcagttggaatgtaaaggtgaaggtgatgtttgggtcaggtgccttagtgaccacgcggtctttgtacagagttactacttagacagagaagctgggcgtgcacctggagatgctgttcataagatctacccaagtgcatatataaaggttagttacaattttatttgaatattttagacttaaagctctatttgttgtcaaaagaattgaaatctgggtggaaggaatggaaaaatgttttatatattaaataataagaaattgtgtttaagtataaaaaacacattttctgagggcatttattgacattatcagtaatctagttttatcgttgccaatttgttacattttgttttttattttatttatttatttatttatttatttttgagacagagtcttgctctcgtcgcccaggctggaatgcagtggcgtgatctcggctcactgcaacctgcgcctcctggggtcaagcaattctcgtgcctcagcatcccaagtagctgggattacaggcacatgttactgtgcctggcaattttttgtatttttagtagagacggggtttcaccatgttggccaggctggtctcgaactcctgacctaaagtgatccgcccaacttggcctcccaaagtgctgggattacaggtgtgaaccactgtgccaggcctgttacatgttttagagtaatacaaaggctcttgaaaatactgagtgaagcctccaaagttgtattcctgtaacttgaaatttgtaagaatcagactctggactttcatcttagccaatcttcaggattttatggaagagaattctaaaattaatagcttttcaaattaagaacctgataagcctgaaatatttttcactagttatatattcaacctgtttgaattttactttataatataacctgtttttgaaagagaaaggcagttgtaattagatagcctaaatatatttttaattgtgtgtcatcctcaacattttcattgtcagtgattgtaaattggtagaattaactgtgtctcataacttattaccaggaagttgcttaggataaaaataatgtagccccatagcatccataaaaatggaattgcctgattacctcacaacagcaaacccagtttctcatttccagttatagttcagttaaagaatgttggaatttttttatatgacacttttaaacatgccaagtatagcgaaaataataaaccacatgtacctatcatccagctgcaacaattatcagcactttaccaatctttaatgtgtttctcccccaacttttttttcctggagtcgttgaaagccaattccaaacagcatagtcactcataaaatatttctgtgtgagtaactcataaaatactcctgtgtaactcacaaatctatacagacttctgaaaaacataatcgcggtgctatttattacacttaataaattagcatcaattccctgttaaaattttcaacaatagagcatcagttatagtctgttagaacaatagaataaagcaataaagtattatatttattgataggatatccatgtgtatagaaaagttagttattaaacaatacataaggcctgatttagtggctcatgcgtgtaatcttagcactttcggaggccaaggttggaggattgcttgagaccaggagttcaagaccaacgtaagccacaaagtgatacccccatctctacaaaaaaattaaaaaattagctgggtgtggtggtgcatgcctgtagttttagctacttgggaggctgagatgggagcattgcttgagcccaggagttcaaggctgcggagagccatgatcatgccactgtgctccagactaggtgatagagtgagaccctttctcaaaaataaataaataaatagacaatacatagactatgatctcatttttgttaaatgatatcatgatatttgttatttgtttatatgtacccataagtctagactggtatgtataatggaattgtctctatgaggtggaaattatttgtattttgcagtttttttccacaagtaatttctgtattggttatttatgctgtattattattatttttgagacagagtcttgctctgtcacccaggctagagtacagtggtgccatcttggctcactgcaacctctgcttccagggtttaagtgattctcatgccttagcctctccggtagctgggattacaggtgtgtgccaccacgcctggctaatttttgtatttagtagagacggggtttcaccgtgttggccaggctggtctggaactcctgacctcaagtgatcagcccaactcagctcccaaagtgcaaggattgcaggtgtgagccactacgcctggccttttgttgttattttttaatggctttggatttccttatatgttttgtagtccattttgtattcgtgggccaagtttgttttgagagaattcactcattttattatttattttttcttcctgtcattgcttcaccctatgtggcaattttgccttaccctggcatctgggattcacatctcagaaccaaatcttataaatttaggaagtagggggactttgtctcctgaggaaattgagttccattctgcaggtatgcttggggcctaattcctgattgcctagatttctctgaaacttttccctgccgtgggcaaatattttattcctaggtgtacttctgaattggctgtattttaccagcacttgatttatgggcaggtgcccacttgtagcccccagagagtttggctgttgtctctctccatattattccaagaagtcaaattcctgttccctgccctttgtttatggtcttggtatacccctagtacctcctatctttagtctctgctctccactgtgggttttatttatcatcagtttggatgtatggattgtttccatatgaatttcatgatcagtttggagaggatgactattttaaatagtttttctgttatttgtatgtggttgaagcagagagagaaggtgattatgtatacccacttaacccatcttgactcagaagtctcttgttttatttatgtaatttaaagtgactggatagagaactatggtgttgaatatatactgtgtgccagatagtatttataaacttaatcagatatggagtagtatttaaaacaattgagcttaaataatgtggaatcgtgcaagtgtaatttcttggatgtcaaatagatacattgtgacttatttatattttggtacagatggcctttgaaaagcccccaaggtgtgagacaagtcatcacttgataaaccactgtcttggacagatcttaatagtgatctcatacttttaccatgaaaagtagataaataccttgttggacaagatatttggaatttaaaaaaatctcatttgtgtatattaactaagattttaaaataattatgtctgtttaccaagtatattactgttctttagaagagtcttactagtcagaaagagacagttacaagtacaaccccatccacaatttcactttccatggcttcaggtatccatggtcaaccacagtccaaaaatattaaatgaaaaattccagaaacaattcataggttttaaaatgtgcgctgttctgagtagatgatgaaatctcactccattctgcttgggatgtaaaaccttttgccagcatatccatgctgtctacattacccacccattagtcactgagtagcgagctcagttttcagattgactgtcatggtctcacagtgcttgtcatccagtaacctttatttagttcataatggccccaaagtgcaagggtaatgatgctgggatattgttaacattgttctgttttattattacctgttgttgttaatctcttactatgcctaatttgtaagttaaacttcattatgaggtatgtatgtataggaaaaaacatagtatatgcacagtactatctaaagtttcatgcatccactggaagtcttggaacatatcccccatagataagggaggaatactgtataccttaaaatttaaccattggcattttcttcattcgtttttttgggtagcagtaactaagggatttgtaagttatcagattttcacaggagatgatattattggggtaaattgtatgtagatagcatgcacccctggaaggagtgcccacactttgagtacacaaatgtgtgcatgcacatacacacacacacacatacacacacacacacacattcccctttttaattaaaatgaggaaaacacacttggagagccataatttcattttataagccaagaagctaggactaaattgtggtttttttcacccttctaagttgactttttttcctgcttctctcatgacatagtagtcattttttacttaacgaaaatctgatgtaatgaaatgacattttacaagctt

SEQ ID NO: 12 - DNA, 6226 bp, Homo sapiens
aagcgggggcggcagcggtggtagcagctggtacctcccgccgcctctgttcggagggtcgcggggcaccgaggtgctttccggccgccctctggtcggccacccaaagccgcgggcgctgatgatgggtgaggagggggcggcaagatttcgggcgcccctgccctgaacgccctcagctgctgccgccggggccgctccagtgcctgcgaactctgaggagccgaggcgccggtgagagcaaggacgctgcaaacttgcgcagcgcgggggctgggattcacgcccagaagttcagcaggcagacagtccgaagccttcccgcagcggagagatagcttgagggtgcgcaagacggcagcctccgccctcggttcccgcccagaccgggcagaagagcttggaggagccacaaggaacgcaaaaggcggccaggacagcgtgcagcagctgggagccgccgttctcagccttaaaagttgcagagattggaggctgccccgagaggggacagaccccagctccgactgcggggggcaggagaggacggtacccaactgccacctcccttcaaccatagtagttcctctgtaccgagcgcagcgagctacagacgggggcgcggcactcggcgcggagagcgggaggctcaaggtcccagccagtgagcccagtgtgcttgagtgtctctggactcgcccctgagcttccaggtctgtttcatttagactcctgctcgcctccgtgcagttgggggaaagcaagagacttgcgcgcacgcacagtcctctggagatcaggtggaaggagccgctgggtaccaaggactgttcagagcctcttcccatctcggggagagcgaagggtgaggctgggcccggagagcagtgtaaacggcctcctccggcgggatgggagccatcgggctcctgtggctgctgccgctgctgctttccacggcagctgtgggctccgggatggggaccggccagcgcgcgggctccccagctgcggggtcgccgctgcagccccgggagccactcagctactcgcgcctgcagaggaagagtctggcagttgacttcgtggtgccctcgctcttccgtgtctacgcccgggacctactgctgccaccatcctcctcggagctgaaggctggcaggcccgaggcccgcggctcgctagctctggactgcgccccgctgctcaggttgctggggccggcgccgggggtctcctggaccgccggttcaccagccccggcagaggcccggacgctgtccagggtgctgaagggcggctccgtgcgcaagctccggcgtgccaagcagttggtgctggagctgggcgaggaggcgatcttggagggttgcgtcgggccccccggggaggcggctgtggggctgctccagttcaatctcagcgagctgttcagttggtggattcgccaaggcgaagggcgactgaggatccgcctgatgcccgagaagaaggcgtcggaagtgggcagagagggaaggctgtccgcggcaattcgcgcctcccagccccgccttctcttccagatcttcgggactggtcatagctccttggaatcaccaacaaacatgccatctccttctcctgattattttacatggaatctcacctggataatgaaagactccttccctttcctgtctcatcgcagccgatatggtctggagtgcagctttgacttcccctgtgagctggagtattcccctccactgcatgacctcaggaaccagagctggtcctggcgccgcatcccctccgaggaggcctcccagatggacttgctggatgggcctggggcagagcgttctaaggagatgcccagaggctcctttctccttctcaacacctcagctgactccaagcacaccatcctgagtccgtggatgaggagcagcagtgagcactgcacactggccgtctcggtgcacaggcacctgcagccctctggaaggtacattgcccagctgctgccccacaacgaggctgcaagagagatcctcctgatgcccactccagggaagcatggttggacagtgctccagggaagaatcgggcgtccagacaacccatttcgagtggccctggaatacatctccagtggaaaccgcagcttgtctgcagtggacttctttgccctgaagaactgcagtgaaggaacatccccaggctccaagatggccctgcagagctccttcacttgttggaatgggacagtcctccagcttgggcaggcctgtgacttccaccaggactgtgcccagggagaagatgagagccagatgtgccggaaactgcctgtgggtttttactgcaactttgaagatggcttctgtggctggacccaaggcacactgtcaccccacactcctcagtggcaggtcaggaccctaaaggatgcccggttccaggaccaccaagaccatgctctattgctcagtaccactgatgtccccgcttctgaaagtgctacagtgaccagtgctacgtttcctgcaccgatcaagagctctccatgtgagctccgaatgtcctggctcattcgtggagtcttgaggggaaacgtgtccttggtgctagtggagaacaaaaccgggaaggagcaaggcaggatggtctggcatgtcgccgcctatgaaggcttgagcctgtggcagtggatggtgttgcctctcctcgatgtgtctgacaggttctggctgcagatggtcgcatggtggggacaaggatccagagccatcgtggcttttgacaatatctccatcagcctggactgctacctcaccattagcggagaggacaagatcctgcagaatacagcacccaaatcaagaaacctgtttgagagaaacccaaacaaggagctgaaacccggggaaaattcaccaagacagacccccatctttgaccctacagttcattggctgttcaccacatgtggggccagcgggccccatggccccacccaggcacagtgcaacaacgcctaccagaactccaacctgagcgtggaggtggggagcgagggccccctgaaaggcatccagatctggaaggtgccagccaccgacacctacagcatctcgggctacggagctgctggcgggaaaggcgggaagaacaccatgatgcggtcccacggcgtgtctgtgctgggcatcttcaacctggagaaggatgacatgctgtacatcctggttgggcagcagggagaggacgcctgccccagtacaaaccagttaatccagaaagtctgcattggagagaacaatgtgatagaagaagaaatccgtgtgaacagaagcgtgcatgagtgggcaggaggcggaggaggagggggtggagccacctacgtatttaagatgaaggatggagtgccggtgcccctgatcattgcagccggaggtggcggcagggcctacggggccaagacagacacgttccacccagagagactggagaataactcctcggttctagggctaaacggcaattccggagccgcaggtggtggaggtggctggaatgataacacttccttgctctgggccggaaaatctttgcaggagggtgccaccggaggacattcctgcccccaggccatgaagaagtgggggtgggagacaagagggggtttcggagggggtggaggggggtgctcctcaggtggaggaggcggaggatatataggcggcaatgcagcctcaaacaatgaccccgaaatggatggggaagatggggtttccttcatcagtccactgggcatcctgtacaccccagctttaaaagtgatggaaggccacggggaagtgaatattaagcattatctaaactgcagtcactgtgaggtagacgaatgtcacatggaccctgaaagccacaaggtcatctgcttctgtgaccacgggacggtgctggctgaggatggcgtctcctgcattgtgtcacccaccccggagccacacctgccactctcgctgatcctctctgtggtgacctctgccctcgtggccgccctggtcctggctttctccggcatcatgattgtgtaccgccggaagcaccaggagctgcaagccatgcagatggagctgcagagccctgagtacaagctgagcaagctccgcacctcgaccatcatgaccgactacaaccccaactactgctttgctggcaagacctcctccatcagtgacctgaaggaggtgccgcggaaaaacatcaccctcattcggggtctgggccatggcgcctttggggaggtgtatgaaggccaggtgtccggaatgcccaacgacccaagccccctgcaagtggctgtgaagacgctgcctgaagtgtgctctgaacaggacgaactggatttcctcatggaagccctgatcatcagcaaattcaaccaccagaacattgttcgctgcattggggtgagcctgcaatccctgccccggttcatcctgctggagctcatggcggggggagacctcaagtccttcctccgagagacccgccctcgcccgagccagccctcctccctggccatgctggaccttctgcacgtggctcgggacattgcctgtggctgtcagtatttggaggaaaaccacttcatccaccgagacattgctgccagaaactgcctcttgacctgtccaggccctggaagagtggccaagattggagacttcgggatggcccgagacatctacagggcgagctactatagaaagggaggctgtgccatgctgccagttaagtggatgcccccagaggccttcatggaaggaatattcacttctaaaacagacacatggtcctttggagtgctgctatgggaaatcttttctcttggatatatgccataccccagcaaaagcaaccaggaagttctggagtttgtcaccagtggaggccggatggacccacccaagaactgccctgggcctgtataccggataatgactcagtgctggcaacatcagcctgaagacaggcccaactttgccatcattttggagaggattgaatactgcacccaggacccggatgtaatcaacaccgctttgccgatagaatatggtccacttgtggaagaggaagagaaagtgcctgtgaggcccaaggaccctgagggggttcctcctctcctggtctctcaacaggcaaaacgggaggaggagcgcagcccagctgccccaccacctctgcctaccacctcctctggcaaggctgcaaagaaacccacagctgcagaggtctctgttcgagtccctagagggccggccgtggaagggggacacgtgaatatggcattctctcagtccaaccctccttcggagttgcacaaggtccacggatccagaaacaagcccaccagcttgtggaacccaacgtacggctcctggtttacagagaaacccaccaaaaagaataatcctatagcaaagaaggagccacacgacaggggtaacctggggctggagggaagctgtactgtcccacctaacgttgcaactgggagacttccgggggcctcactgctcctagagccctcttcgctgactgccaatatgaaggaggtacctctgttcaggctacgtcacttcccttgtgggaatgtcaattacggctaccagcaacagggcttgcccttagaagccgctactgcccctggagctggtcattacgaggataccattctgaaaagcaagaatagcatgaaccagcctgggccctgagctcggtcgcacactcacttctcttccttgggatccctaagaccgtggaggagagagaggcaatggctccttcacaaaccagagaccaaatgtcacgttttgttttgtgccaacctattttgaagtaccaccaaaaaagctgtattttgaaaatgctttagaaaggttttgagcatgggttcatcctattctttcgaaagaagaaaatatcataaaaatgagtgataaatacaaggcccagatgtggttgcataaggtttttatgcatgtttgttgtatacttccttatgcttcttttaaattgtgtgtgctctgcttcaatgtagtcagaattagctgcttctatgtttcatagttggggtcatagatgtttccttgccttgttgatgtggacatgagccatttgaggggagagggaacggaaataaaggagttatttgtaatgactaaaa

SEQ ID NO: 13 - DNA, 5484 bp, Homo sapiens
aattgtcagcacgggatctgagacttccaaaaaatgaagccggcgacaggactttgggtctgggtgagccttctcgtggcggcggggaccgtccagcccagcgattctcagtcagtgtgtgcaggaacggagaataaactgagctctctctctgacctggaacagcagtaccgagccttgcgcaagtactatgaaaactgtgaggttgtcatgggcaacctggagataaccagcattgagcacaaccgggacctctccttcctgcggtctgttcgagaagtcacaggctacgtgttagtggctcttaatcagtttcgttacctgcctctggagaatttacgcattattcgtgggacaaaactttatgaggatcgatatgccttggcaatatttttaaactacagaaaagatggaaactttggacttcaagaacttggattaaagaacttgacagaaatcctaaatggtggagtctatgtagaccagaacaaattcctttgttatgcagacaccattcattggcaagatattgttcggaacccatggccttccaacttgactcttgtgtcaacaaatggtagttcaggatgtggacgttgccataagtcctgtactggccgttgctggggacccacagaaaatcattgccagactttgacaaggacggtgtgtgcagaacaatgtgacggcagatgctacggaccttacgtcagtgactgctgccatcgagaatgtgctggaggctgctcaggacctaaggacacagactgctttgcctgcatgaatttcaatgacagtggagcatgtgttactcagtgtccccaaacctttgtctacaatccaaccacctttcaactggagcacaatttcaatgcaaagtacacatatggagcattctgtgtcaagaaatgtccacataactttgtggtagattccagttcttgtgtgcgtgcctgccctagttccaagatggaagtagaagaaaatgggattaaaatgtgtaaaccttgcactgacatttgcccaaaagcttgtgatggcattggcacaggatcattgatgtcagctcagactgtggattccagtaacattgacaaattcataaactgtaccaagatcaatgggaatttgatctttctagtcactggtattcatggggacccttacaatgcaattgaagccatagacccagagaaactgaacgtctttcggacagtcagagagataacaggtttcctgaacatacagtcatggccaccaaacatgactgacttcagtgttttttctaacctggtgaccattggtggaagagtactctatagtggcctgtccttgcttatcctcaagcaacagggcatcacctctctacagttccagtccctgaaggaaatcagcgcaggaaacatctatattactgacaacagcaacctgtgttattatcataccattaactggacaacactcttcagcacaatcaaccagagaatagtaatccgggacaacagaaaagctgaaaattgtactgctgaaggaatggtgtgcaaccatctgtgttccagtgatggctgttggggacctgggccagaccaatgtctgtcgtgtcgccgcttcagtagaggaaggatctgcatagagtcttgtaacctctatgatggtgaatttcgggagtttgagaatggctccatctgtgtggagtgtgacccccagtgtgagaagatggaagatggcctcctcacatgccatggaccgggtcctgacaactgtacaaagtgctctcattttaaagatggcccaaactgtgtggaaaaatgtccagatggcttacagggggcaaacagtttcattttcaagtatgctgatccagatcgggagtgccacccatgccatccaaactgcacccaagggtgtaacggtcccactagtcatgactgcatttactacccatggacgggccattccactttaccacaacatgctagaactcccctgattgcagctggagtaattggtgggctcttcattctggtcattgtgggtctgacatttgctgtttatgttagaaggaagagcatcaaaaagaaaagagccttgagaagattcttggaaacagagttggtggaaccattaactcccagtggcacagcacccaatcaagctcaacttcgtattttgaaagaaactgagctgaagagggtaaaagtccttggctcaggtgcttttggaacggtttataaaggtatttgggtacctgaaggagaaactgtgaagattcctgtggctattaagattcttaatgagacaactggtcccaaggcaaatgtggagttcatggatgaagctctgatcatggcaagtatggatcatccacacctagtccggttgctgggtgtgtgtctgagcccaaccatccagctggttactcaacttatgccccatggctgcctgttggagtatgtccacgagcacaaggataacattggatcacaactgctgcttaactggtgtgtccagatagctaagggaatgatgtacctggaagaaagacgactcgttcatcgggatttggcagcccgtaatgtcttagtgaaatctccaaaccatgtgaaaatcacagattttgggctagccagactcttggaaggagatgaaaaagagtacaatgctgatggaggaaagatgccaattaaatggatggctctggagtgtatacattacaggaaattcacccatcagagtgacgtttggagctatggagttactatatgggaactgatgacctttggaggaaaaccctatgatggaattccaacgcgagaaatccctgatttattagagaaaggagaacgtttgcctcagcctcccatctgcactattgacgtttacatggtcatggtcaaatgttggatgattgatgctgacagtagacctaaatttaaggaactggctgctgagttttcaaggatggctcgagaccctcaaagatacctagttattcagggtgatgatcgtatgaagcttcccagtccaaatgacagcaagttctttcagaatctcttggatgaagaggatttggaagatatgatggatgctgaggagtacttggtccctcaggctttcaacatcccacctcccatctatacttccagagcaagaattgactcgaataggagtgaaattggacacagccctcctcctgcctacacccccatgtcaggaaaccagtttgtataccgagatggaggttttgctgctgaacaaggagtgtctgtgccctacagagccccaactagcacaattccagaagctcctgtggcacagggtgctactgctgagatttttgatgactcctgctgtaatggcaccctacgcaagccagtggcaccccatgtccaagaggacagtagcacccagaggtacagtgctgaccccaccgtgtttgccccagaacggagcccacgaggagagctggatgaggaaggttacatgactcctatgcgagacaaacccaaacaagaatacctgaatccagtggaggagaacccttttgtttctcggagaaaaaatggagaccttcaagcattggataatcccgaatatcacaatgcatccaatggtccacccaaggccgaggatgagtatgtgaatgagccactgtacctcaacacctttgccaacaccttgggaaaagctgagtacctgaagaacaacatactgtcaatgccagagaaggccaagaaagcgtttgacaaccctgactactggaaccacagcctgccacctcggagcacccttcagcacccagactacctgcaggagtacagcacaaaatatttttataaacagaatgggcggatccggcctattgtggcagagaatcctgaatacctctctgagttctccctgaagccaggcactgtgctgccgcctccaccttacagacaccggaatactgtggtgtaagctcagttgtggttttttaggtggagagacacacctgctccaatttccccacccccctctctttctctggtggtcttccttctaccccaaggccagtagttttgacacttcccagtggaagatacagagatgcaatgatagttatgtgcttacctaacttgaacattagagggaaagactgaaagagaaagataggaggaaccacaatgtttcttcatttctctgcatgggttggtcaggagaatgaaacagctagagaaggaccagaaaatgtaaggcaatgctgcctactatcaaactagctgtcactttttttctttttctttttctttctttgtttctttcttcctcttctttttttttttttttttaaagcagatggttgaaacacccatgctatctgttcctatctgcaggaactgatgtgtgcatatttagcatccctggaaatcataataaagtttccattagaacaaaagaataacattttctataacatatgatagtgtctgaaattgagaatccagtttctttccccagcagtttctgtcctagcaagtaagaatggccaactcaactttcataatttaaaaatctccattaaagttataactagtaattatgttttcaacactttttggtttttttcattttgttttgctctgaccgattcctttatatttgctcccctatttttggctttaatttctaattgcaaagatgtttacatcaaagcttcttcacagaatttaagcaagaaatattttaatatagtgaaatggccactactttaagtatacaatctttaaaataagaaagggaggctaatatttttcatgctatcaaattatcttcaccctcatcctttacatttttcaacatttttttttctccataaatgacactacttgataggccgttggttgtctgaagagtagaagggaaactaagagacagttctctgtggttcaggaaaactactgatactttcaggggtggcccaatgagggaatccattgaactggaagaaacacactggattgggtatgtctacctggcagatactcagaaatgtagtttgcacttaagctgtaattttatttgttctttttctgaactccattttggattttgaatcaagcaatatggaagcaaccagcaaattaactaatttaagtacatttttaaaaaaagagctaagataaagactgtggaaatgccaaaccaagcaaattaggaaccttgcaacggtatccagggactatgatgagaggccagcacattatcttcatatgtcacctttgctacgcaaggaaatttgttcagttcgtatacttcgtaagaaggaatgcgagtaaggattggcttgaattccatggaatttctagtatgagactatttatatgaagtagaaggtaactctttgcacataaattggtataataaaaagaaaaacacaaacattcaaagcttagggataggtccttgggtcaaaagttgtaaataaatgtgaaacatcttctc

SEQ ID NO: 14 - DNA, 570 bp, Homo sapiens
atgacggaatataagctggtggtggtgggcgccggcggtgtgggcaagagtgcgctgaccatccagctgatccagaaccattttgtggacgaatacgaccccactatagaggattcctaccggaagcaggtggtcattgatggggagacgtgcctgttggacatcctggataccgccggccaggaggagtacagcgccatgcgggaccagtacatgcgcaccggggagggcttcctgtgtgtgtttgccatcaacaacaccaagtcttttgaggacatccaccagtacagggagcagatcaaacgggtgaaggactcggatgacgtgcccatggtgctggtggggaacaagtgtgacctggctgcacgcactgtggaatctcggcaggctcaggacctcgcccgaagctacggcatcccctacatcgagacctcggccaagacccggcagggagtggaggatgccttctacacgttggtgcgtgagatccggcagcacaagctgcggaagctgaaccctcctgatgagagtggccccggctgcatgagctgcaagtgtgtgctctcctga

SEQ ID NO: 15 - DNA, 9309 bp, Homo sapiens
atgccgccgctcctggcgcccctgctctgcctggcgctgctgcccgcgctcgccgcacgaggcccgcgatgctcccagcccggtgagacctgcctgaatggcgggaagtgtgaagcggccaatggcacggaggcctgcgtctgtggcggggccttcgtgggcccgcgatgccaggaccccaacccgtgcctcagcaccccctgcaagaacgccgggacatgccacgtggtggaccgcagaggcgtggcagactatgcctgcagctgtgccctgggcttctctgggcccctctgcctgacacccctggacaatgcctgcctcaccaacccctgccgcaacgggggcacctgcgacctgctcacgctgacggagtacaagtgccgctgcccgcccggctggtcagggaaatcgtgccagcaggctgacccgtgcgcctccaacccctgcgccaacggtggccagtgcctgcccttcgaggcctcctacatctgccactgcccacccagcttccatggccccacctgccggcaggatgtcaacgagtgtggccagaagcccgggctttgccgccacggaggcacctgccacaacgaggtcggctcctaccgctgcgtctgccgcgccacccacactggccccaactgcgagcggccctacgtgccctgcagcccctcgccctgccagaacgggggcacctgccgccccacgggcgacgtcacccacgagtgtgcctgcctgccaggcttcaccggccagaactgtgaggaaaatatcgacgattgtccaggaaacaactgcaagaacgggggtgcctgtgtggacggcgtgaacacctacaactgccgctgcccgccagagtggacaggtcagtactgtaccgaggatgtggacgagtgccagctgatgccaaatgcctgccagaacggcgggacctgccacaacacccacggtggctacaactgcgtgtgtgtcaacggctggactggtgaggactgcagcgagaacattgatgactgtgccagcgccgcctgcttccacggcgccacctgccatgaccgtgtggcctccttctactgcgagtgtccccatggccgcacaggtctgctgtgccacctcaacgacgcatgcatcagcaacccctgtaacgagggctccaactgcgacaccaaccctgtcaatggcaaggccatctgcacctgcccctcggggtacacgggcccggcctgcagccaggacgtggatgagtgctcgctgggtgccaacccctgcgagcatgcgggcaagtgcatcaacacgctgggctccttcgagtgccagtgtctgcagggctacacgggcccccgatgcgagatcgacgtcaacgagtgcgtctcgaacccgtgccagaacgacgccacctgcctggaccagattggggagttccagtgcatctgcatgcccggctacgagggtgtgcactgcgaggtcaacacagacgagtgtgccagcagcccctgcctgcacaatggccgctgcctggacaagatcaatgagttccagtgcgagtgccccacgggcttcactgggcatctgtgccagtacgatgtggacgagtgtgccagcaccccctgcaagaatggtgccaagtgcctggacggacccaacacttacacctgtgtgtgcacggaagggtacacggggacgcactgcgaggtggacatcgatgagtgcgaccccgacccctgccactacggctcctgcaaggacggcgtcgccaccttcacctgcctctgccgcccaggctacacgggccaccactgcgagaccaacatcaacgagtgctccagccagccctgccgccacgggggcacctgccaggaccgcgacaacgcctacctctgcttctgcctgaaggggaccacaggacccaactgcgagatcaacctggatgactgtgccagcagcccctgcgactcgggcacctgtctggacaagatcgatggctacgagtgtgcctgtgagccgggctacacagggagcatgtgtaacatcaacatcgatgagtgtgcgggcaacccctgccacaacgggggcacctgcgaggacggcatcaatggcttcacctgccgctgccccgagggctaccacgaccccacctgcctgtctgaggtcaatgagtgcaacagcaacccctgcgtccacggggcctgccgggacagcctcaacgggtacaagtgcgactgtgaccctgggtggagtgggaccaactgtgacatcaacaacaatgagtgtgaatccaacccttgtgtcaacggcggcacctgcaaagacatgaccagtggctacgtgtgcacctgccgggagggcttcagcggtcccaactgccagaccaacatcaacgagtgtgcgtccaacccatgtctgaaccagggcacgtgtattgacgacgttgccgggtacaagtgcaactgcctgctgccctacacaggtgccacgtgtgaggtggtgctggccccgtgtgcccccagcccctgcagaaacggcggggagtgcaggcaatccgaggactatgagagcttctcctgtgtctgccccacgggctggcaagggcagacctgtgaggtcgacatcaacgagtgcgttctgagcccgtgccggcacggcgcatcctgccagaacacccacggcggctaccgctgccactgccaggccggctacagtgggcgcaactgcgagaccgacatcgacgactgccggcccaacccgtgtcacaacgggggctcctgcacagacggcatcaacacggccttctgcgactgcctgcccggcttccggggcactttctgtgaggaggacatcaacgagtgtgccagtgacccctgccgcaacggggccaactgcacggactgcgtggacagctacacgtgcacctgccccgcaggcttcagcgggatccactgtgagaacaacacgcctgactgcacagagagctcctgcttcaacggtggcacctgcgtggacggcatcaactcgttcacctgcctgtgtccacccggcttcacgggcagctactgccagcacgatgtcaatgagtgcgactcacagccctgcctgcatggcggcacctgtcaggacggctgcggctcctacaggtgcacctgcccccagggctacactggccccaactgccagaaccttgtgcactggtgtgactcctcgccctgcaagaacggcggcaaatgctggcagacccacacccagtaccgctgcgagtgccccagcggctggaccggcctttactgcgacgtgcccagcgtgtcctgtgaggtggctgcgcagcgacaaggtgttgacgttgcccgcctgtgccagcatggagggctctgtgtggacgcgggcaacacgcaccactgccgctgccaggcgggctacacaggcagctactgtgaggacctggtggacgagtgctcacccagcccctgccagaacggggccacctgcacggactacctgggcggctactcctgcaagtgcgtggccggctaccacggggtgaactgctctgaggagatcgacgagtgcctctcccacccctgccagaacgggggcacctgcctcgacctccccaacacctacaagtgctcctgcccacggggcactcagggtgtgcactgtgagatcaacgtggacgactgcaatccccccgttgaccccgtgtcccggagccccaagtgctttaacaacggcacctgcgtggaccaggtgggcggctacagctgcacctgcccgccgggcttcgtgggtgagcgctgtgagggggatgtcaacgagtgcctgtccaatccctgcgacgcccgtggcacccagaactgcgtgcagcgcgtcaatgacttccactgcgagtgccgtgctggtcacaccgggcgccgctgcgagtccgtcatcaatggctgcaaaggcaagccctgcaagaatgggggcacctgcgccgtggcctccaacaccgcccgcgggttcatctgcaagtgccctgcgggcttcgagggcgccacgtgtgagaatgacgctcgtacctgcggcagcctgcgctgcctcaacggcggcacatgcatctccggcccgcgcagccccacctgcctgtgcctgggccccttcacgggccccgaatgccagttcccggccagcagcccctgcctgggcggcaacccctgctacaaccaggggacctgtgagcccacatccgagagccccttctaccgttgcctgtgccccgccaaattcaacgggctcttgtgccacatcctggactacagcttcgggggtggggccgggcgcgacatccccccgccgctgatcgaggaggcgtgcgagctgcccgagtgccaggaggacgcgggcaacaaggtctgcagcctgcagtgcaacaaccacgcgtgcggctgggacggcggtgactgctccctcaacttcaatgacccctggaagaactgcacgcagtctctgcagtgctggaagtacttcagtgacggccactgtgacagccagtgcaactcagccggctgcctcttcgacggctttgactgccagcgtgcggaaggccagtgcaaccccctgtacgaccagtactgcaaggaccacttcagcgacgggcactgcgaccagggctgcaacagcgcggagtgcgagtgggacgggctggactgtgcggagcatgtacccgagaggctggcggccggcacgctggtggtggtggtgctgatgccgccggagcagctgcgcaacagctccttccacttcctgcgggagctcagccgcgtgctgcacaccaacgtggtcttcaagcgtgacgcacacggccagcagatgatcttcccctactacggccgcgaggaggagctgcgcaagcaccccatcaagcgtgccgccgagggctgggccgcacctgacgccctgctgggccaggtgaaggcctcgctgctccctggtggcagcgagggtgggcggcggcggagggagctggaccccatggacgtccgcggctccatcgtctacctggagattgacaaccggcagtgtgtgcaggcctcctcgcagtgcttccagagtgccaccgacgtggccgcattcctgggagcgctcgcctcgctgggcagcctcaacatcccctacaagatcgaggccgtgcagagtgagaccgtggagccgcccccgccggcgcagctgcacttcatgtacgtggcggcggccgcctttgtgcttctgttcttcgtgggctgcggggtgctgctgtcccgcaagcgccggcggcagcatggccagctctggttccctgagggcttcaaagtgtctgaggccagcaagaagaagcggcgggagcccctcggcgaggactccgtgggcctcaagcccctgaagaacgcttcagacggtgccctcatggacgacaaccagaatgagtggggggacgaggacctggagaccaagaagttccggttcgaggagcccgtggttctgcctgacctggacgaccagacagaccaccggcagtggactcagcagcacctggatgccgctgacctgcgcatgtctgccatggcccccacaccgccccagggtgaggttgacgccgactgcatggacgtcaatgtccgcgggcctgatggcttcaccccgctcatgatcgcctcctgcagcgggggcggcctggagacgggcaacagcgaggaagaggaggacgcgccggccgtcatctccgacttcatctaccagggcgccagcctgcacaaccagacagaccgcacgggcgagaccgccttgcacctggccgcccgctactcacgctctgatgccgccaagcgcctgctggaggccagcgcagatgccaacatccaggacaacatgggccgcaccccgctgcatgcggctgtgtctgccgacgcacaaggtgtcttccagatcctgatccggaaccgagccacagacctggatgcccgcatgcatgatggcacgacgccactgatcctggctgcccgcctggccgtggagggcatgctggaggacctcatcaactcacacgccgacgtcaacgccgtagatgacctgggcaagtccgccctgcactgggccgccgccgtgaacaatgtggatgccgcagttgtgctcctgaagaacggggctaacaaagatatgcagaacaacagggaggagacacccctgtttctggccgcccgggagggcagctacgagaccgccaaggtgctgctggaccactttgccaaccgggacatcacggatcatatggaccgcctgccgcgcgacatcgcacaggagcgcatgcatcacgacatcgtgaggctgctggacgagtacaacctggtgcgcagcccgcagctgcacggagccccgctggggggcacgcccaccctgtcgcccccgctctgctcgcccaacggctacctgggcagcctcaagcccggcgtgcagggcaagaaggtccgcaagcccagcagcaaaggcctggcctgtggaagcaaggaggccaaggacctcaaggcacggaggaagaagtcccaggacggcaagggctgcctgctggacagctccggcatgctctcgcccgtggactccctggagtcaccccatggctacctgtcagacgtggcctcgccgccactgctgccctccccgttccagcagtctccgtccgtgcccctcaaccacctgcctgggatgcccgacacccacctgggcatcgggcacctgaacgtggcggccaagcccgagatggcggcgctgggtgggggcggccggctggcctttgagactggcccacctcgtctctcccacctgcctgtggcctctggcaccagcaccgtcctgggctccagcagcggaggggccctgaatttcactgtgggcgggtccaccagtttgaatggtcaatgcgagtggctgtcccggctgcagagcggcatggtgccgaaccaatacaaccctctgcgggggagtgtggcaccaggccccctgagcacacaggccccctccctgcagcatggcatggtaggcccgctgcacagtagccttgctgccagcgccctgtcccagatgatgagctaccagggcctgcccagcacccggctggccacccagcctcacctggtgcagacccagcaggtgcagccacaaaacttacagatgcagcagcagaacctgcagccagcaaacatccagcagcagcaaagcctgcagccgccaccaccaccaccacagccgcaccttggcgtgagctcagcagccagcggccacctgggccggagcttcctgagtggagagccgagccaggcagacgtgcagccactgggccccagcagcctggcggtgcacactattctgccccaggagagccccgccctgcccacgtcgctgccatcctcgctggtcccacccgtgaccgcagcccagttcctgacgcccccctcgcagcacagctactcctcgcctgtggacaacacccccagccaccagctacaggtgcctgagcaccccttcctcaccccgtcccctgagtcccctgaccagtggtccagctcgtccccgcattccaacgtctccgactggtccgagggcgtctccagccctcccaccagcatgcagtcccagatcgcccgcattccggaggccttcaagtaaacggcgcgccccacgagaccccggcttcctttcccaagccttcgggcgtctgtgtgcgctctgtggatgccagggccgaccagaggagcctttttaaaacacatgtttttatacaaaataagaacgaggattttaattttttttagtatttatttatgtacttttattttacacagaaacactgcctttttatttatatgtactgttttatctggccccaggtagaaacttttatctattctgagaaaacaagcaagttctgagagccagggttttcctacgtaggatgaaaagattcttctgtgtttataaaatataaacaaagattcatgatttataaatgccatttatttattgattccttttttcaaaatccaaaaagaaatgatgttggagaagggaagttgaacgagcatagtccaaaaagctcctggggcgtccaggccgcgccctttccccgacgcccacccaaccccaagccagcccggccgctccaccagcatcacctgcctgttaggagaagctgcatccagaggcaaacggaggcaaagctggctcaccttccgcacgcggattaatttgcatctgaaataggaaacaagtgaaagcatatgggttagatgttgccatgtgttttagatggtttcttgcaagcatgcttgtgaaaatgtgttctcggagtgtgtatgccaagagtgcacccatggtaccaatcatgaatctttgtttcaggttcagtattatgtagttgttcgttggttatacaagttcttggtccctccagaaccaccccggccccctgcccgttcttgaaatgtaggcatcatgcatgtcaaacatgagatgtgtggactgtggcacttgcctgggtcacacacggaggcatcctacccttttctggggaaagacactgcctgggctgaccccggtggcggccccagcacctcagcctgcacagtgtcccccaggttccgaagaagatgctccagcaacacagcctgggccccagctcgcgggacccgaccccccgtgggctcccgtgttttgtaggagacttgccagagccgggcacattgagctgtgcaacgccgtgggctgcgtcctttggtcctgtccccgcagccctggcagggggcatgcggtcgggcaggggctggagggaggcgggggctgcccttgggccacccctcctagtttgggaggagcagatttttgcaataccaagtatagcctatggcagaaaaaatgtctgtaaatatgtttttaaaggtggattttgtttaaaaaatcttaatgaatgagtctgttgtgtgtcatgccagtgagggacgtcagacttggctcagctcggggagccttagccgcccatgcactggggacgctccgctgccgtgccgcctgcactcctcagggcagcctcccccggctctacgggggccgcgtggtgccatccccagggggcatgaccagatgcgtcccaagatgttgatttttactgtgttttataaaatagagtgtagtttacagaaaaagactttaaaagtgatctacatgaggaactgtagatgatgtatttttttcatcttttttgttaactgatttgcaataaaaatgatactgatggtgaaaaaaaaaaaaaaa

SEQ ID NO: 16 - DNA, 1450 bp, Homo sapiens
ggggggttgccggcggggctgcagcggaggcactttggaagaatgactctggagtccatcatggcgtgctgcctgagcgaggaggccaaggaagcccggcggatcaacgacgagatcgagcggcacgtccgcagggacaagcgggacgcccgccgggagctcaagctgctgctgctcgggacaggagagagtggcaagagtacgtttatcaagcagatgagaatcatccatgggtcaggatactctgatgaagataaaaggggcttcaccaagctggtgtatcagaacatcttcacggccatgcaggccatgatcagagccatggacacactcaagatcccatacaagtatgagcacaataaggctcatgcacaattagttcgagaagttgatgtggagaaggtgtctgcttttgagaatccatatgtagatgcaataaagagtttatggaatgatcctggaatccaggaatgctatgatagacgacgagaatatcaattatctgactctaccaaatactatcttaatgacttggaccgcgtagctgaccctgcctacctgcctacgcaacaagatgtgcttagagttcgagtccccaccacagggatcatcgaatacccctttgacttacaaagtgtcattttcagaatggtcgatgtagggggccaaaggtcagagagaagaaaatggatacactgctttgaaaatgtcacctctatcatgtttctagtagcgcttagtgaatatgatcaagttctcgtggagtcagacaatgagaaccgaatggaggaaagcaaggctctctttagaacaattatcacatacccctggttccagaactcctcggttattctgttcttaaacaagaaagatcttctagaggagaaaatcatgtattcccatctagtcgactacttcccagaatatgatggaccccagagagatgcccaggcagcccgagaattcattctgaagatgttcgtggacctgaacccagacagtgacaaaattatctactcccacttcacgtgcgccacagacaccgagaatatccgctttgtctttgctgccgtcaaggacaccatcctccagttgaacctgaaggagtacaatctggtctaattgtgcctcctagacacccgccctgcccttccctggtgggctattgaagatacacaagagggactgtattttctgtggaaaacaatttgcataatactaatttattgccgtccggactctgtgtgtatatgtgcaatttttcaacaaatgcaaaaaaaatacagcacatgtattgacagcttctgtcagcagcttgagttgaaatttgatttaagaaaataaatcatgattgttcaaagctgctgggacgttagaattaggccatgatactggtctcatttaactacagtggtatttggcactagtgtaaacttccatataaatcact

SEQ ID NO: 17 - DNA, 50890 bp, Homo sapiens
ttggtttcccaccactgtgaggatacagaacaaagcaacttcagtcactgcccttcccaactctccagtgtctccttgccctaccttccagccccatgtgtgtcttcgtaatagcatagttgcattttttttttttttaagagaggcagggtctccctttgttgcccaggctgcagtgcagtggtgcaatcagctcactataaccttgaactcctgggctcaagggatcttcccctctccacttcccaagtagctggggctacaggtgcacaccgccatgccacacccagcttatttattttagaatttttgtagagacagggtcttgctgtcttgtccagtctggtctcaaactcctggcttcaagtgatcctccctgccttggcctcctaaagagttgggattacaaggccgggcgcagtggctcacacctgtaatcccagcactttgggaggccgaggggggcggatcacgaggtcaggagatcgagaccatcctggctaacatggtgaaaccctgtctctactaaaaatacaaaaaattagctgggcgtggtggcgggtgcctgtagtcccagctacttgggaggctgaggcaggagactccagcctcaaaaaaaaaaaaaagagttaggattacaggcatgagccgctgagcccagccacagctgcaatttcattagattgaacggtgtgaaatcatcagtagtgggccactgttttactccctgcattattcaatcatgattgctttcagactttcattagtttcactagcttcgcgctgtaagagccaagaggcagagccacagggctgggctgcctggtttcactccccactgcagggctcggttaagcagagtgtaggctaagagaggaatggagaaggtggaaggtgtctctcccttccaacgctcatctgatgcaccagccaaaccaaataccacctgggcctttgaacattgccaagcctcatccgctgttgtcattttgcccacctccacagctgcagggacagccgtaggcccggaactgggatatctcttcctaggggcctgcctatctgctcagctgcactgcgttttaggggtggggaagctaaggcacgagattggggtcccaaagcatgcccagaccacccaggcttccagatactaggtcctcctccttcaggcctcacttcgttgcttttcccctgggctcagttccagtcctggctgtaagactgggaaagccactgcttgagtcaggacctcagtggctatttttgtccgtgagaagtcctctacaccacgacttgggaggcagcctgggagaaagagaaattagtcgtggctcctttaaggggtccgcggaggcgcgcccggccttttgtttgagcggcggcgcgcgcgtcagcgtcaacgccagcgcctgcgcactgagggcggcctggtcgtcgtctgcggcggcggcggcggctgaggagcccggctgaggcgccagtacccggcccggtccgcatttcgccttccggcttcggtttccctcggcccagcacgccccggccccgccccagccctcctgatccctcgcagcccggctccggccgcccgcctctgccgccgcaatgatgatgatggcgctgagcaagaccttcgggcagaagcccgtgaagttccagctggaggacgacggcgagttctacatgatcggctccgaggtagcccggggcgcgttctcgccctccccgggctcggccccgcgggagccccggggcgggcccatgcgccgagagcgcgcgtctccattcatcggggcgggcgggcgcgcgcgcgcgcgctcggggctgtggggcgtggcctagtgggcgtgtcgggtgtggcccccgccccctcatcgacctgggatttccttacttatttcgccgaggtccgccgccttcagtgctgccaagattttggcgccgcgaggggccccagtggttccgcgctgggttggtttccagtcagacgcaaagaaacgggatattgagttagcccctgcgacgcttgggggactgcactgctgcctttgaccctttttagatgtcgtaaatttcacgtgcacccctccccgtattgctacttgtgggaacctcaaatggcaggctggaaaccctggacttagtgagggctcatccccattgtgtttgttgcctcttaggtgagcagtggaggtcttttgacctttgtttaccggtgaagaaacagattggaggaagatgtttgcttttgggtgaataagggccccatgcctaagctagatctttcagcagttctgaagcgattgacactttccatatctgtgaactgattctgaattattacaggggaaagagcctaaggatgtttaacccttaactagagtggctgcattttgttgcatcaactggatgactgacttcaggaaaactctactggcctttgaatgggtgtttgttccaagtctattaggttcttgttttttgttttttatagagacagggtctggctatgttgcgcaggcaggtctccaactcctgggctcaagcagtctgcccgtctgggtctcccaaagtgctaggattacaggcatgagccaccacacccggccatatattaggtttttacagattgtctcaaactagccttttttgctccaaaggcagtccccagctagtatatgttacctttttaaaaaaattatggatatacagttcagatgtacaaatgtcaagcagtagaatctcatgtaaggaagtaagtgccaatcctggagaattaaagctatcatgaaatgccaagagtttcttctccttatagcagtttttagtatcatattccagcattttattcgtactttattttcttttatttttgaaaaaagatctcactttgtgcagtggtgtgatctcggctcactgcagccttgacctcctgggctcaagcgatcctcctgcctcagcctcccaagtacctgggactacaggtgtgcaccaccgtgcccgactaatttttgtattttttgtagagacagggttttgccatgttgcccaggctggtcttgaactcctgggctcaagtgatccttgcacctcagcctctcaaagtgctggaatgacaggtgtgagctactgcactcacactcagcgcattcatactttttaaacttgtgggttttatccttcacaattgagcatagcatgaatgaatgaagcctcaagatggtcacactgagtcccatggatgagactaaggtcaatagcatcagaactttagtgttagcattttccaccattttttttttctggacgaggtttgactctatcacccaggctggagtgtagtggtgtaatctcggctcactgcaacctccgcctcccaggctcaagccgtcctcccacctcagtctcccaagtagctgggactacacgcacacaccaccacacccggctaatttttatatttttagtaaagatggggttttaccatattgtccaggctggtcttaaacttgtgagctcaagtgatctgcccgcctcggcctcccaaagtgctcgattataggcgtgagccactgtgcctggcctccactaatttttataaaacaaaaaatataggattcaataaaattttcacgttgtcacttaaattacaactgttcaaagatgccagtgctggggaggtagagccagtgcctgtccatctgccacagttcagaatggtcctcattggccagtaggcacctgcctaactgcagaatgcaaaaggtgtcaaatttcagcctgtgatactaggcgagttgtttacctgatctaatgggtgtaaaagtaatcagtttggctctaagtaggtgacacttcaaaagaaagctttcatttattagttggagcaaattgagaagctgtgcgtggccaagtgggaagaaccttgggaggcctggttccagccctgctctgccttgctgtcgtgtttctcatgtgtataatgtgatgcttagactagatggtctccaagatcttccccaaaacacattttagtttctagaaagctaattacagtcttgtctttcagccccttgactcctgggcctcccagtaagaataatcttcctgagacccaggctgtaagagactcagttggagaggcagtttgttcttttgggcctgacttaatcatcagaccttcggagtttagggaagagttcaaggtcagagctctattgaaattcagtagctccagtgatagtagtggatggacggtctcagcccactgccctgtggaaaacaggcactgtattcagagaggtgggccagccatagcaacatacccagtgcctccatgcgccatctgtggagctgtcttgggaaggcatctgcatttactaagagtgtgtgtcactgttctgccattaacagacagctgtatttaccaagccggagtcatggagctttgaggaccctaacagatccccaagtccagcaccttgattttatattcaggaaacctgggtcccaagagggtgaaggctggttcagaggaaagccaggaaggcaagcccagtttcctaagttctgaaggggctttggggggcatctaggagactcagagccctgcagggcctgcaaggtagtcataggggggagtattgtcaatttcttttaaaaaacctaatggaaactctacatttaccatgatactggatgatactgacacacaagccaaataacatagaggggtctgtgccctctatgtggaaagcgagtgacttgctgtgtctgctcttctctcagcgttcagtagccctggttgttgattacagtcactgctgaaaatggagaaacattttatttaatactatgcctgggtctcacacctataatcctagcactttgggaggcccaggcaggagaatcacttgaacccaggagtttaagaccagcctgggcaacatagtgagactcttgtctctacagatttttatttttattttttttaattaggccgggtatgtggctcacacccgtaatcccagcactttgggaggccgaggtgggcagatcgcttgagcccaggagtttgagaccagcctgggcaacatggtgaaactccgtctctacaaaaaatacaaaaattagccggttgtggtggcaagcaactatagtcccagctactcaggaggctgaggcaggaggatcgcttgagccgaggagttcgaggctgcagtgagctatgatcgatcgcaccactgcaatcgagcctgggtgacagagcgagaccctgtctcaaaaataataataaaaattaaaaataaatttaaaaatgcaaaatatatactatgttgcatagataaaatgggaaacataatagaagtggtccttcatgggggtgaagttcagagttgctgagcatttggcagatgagtaaagggtacccagaaaatgggaagtgatcccaggttacagatggagccagcacctggcacccagtctattggccatcccctgcaatgtgactccgaagtgatcatacttgaaaagtcaacgagacaatagggtaccctcataaaaactttaggtctagatttattttccttaaggaagtcacactttcagtatttggtacaagcaaactgaagccattgtttgagtcagtgatgatttatatagcagtctggtgattgccttgtaaaccttttggaaaattcctttggtatccctggtttgggttttgttactaaacaaagtaacacaggccatgggggaaattatctggcatctgtctaaaattaaaagacctttttggtgtttattacattgtaaaaatatcaaagtcttgtccttaagataaaagaaggtcaaggaggccttgcatttctggaaagtgccagagatccttagtccaaaatcaaaatcaccacgaacttcttgctaagctctgggggcctcccactcaggcatctgcccaggcctttcggaacttggttctgttgtcaggatgcacatatgcaggccagatgtgcactgctggtgaacccttcatatcagcagaatgtgttttaatgctgccgaaagcgtggcgcctgggggccacctcaaggcctgtttgtctgttgcttgatgcagtctgcgccaggaccctccccttccctgtggtgctgcgacccttataatgagccttcttgctttactcataggtgggaaactacctccgtatgttccgaggttctctgtacaagagatacccctcactctggaggcgactagccactgtggaagagaggaagaaaatagttgcatcgtcacatggtaaaaaaacaaaacctaacactaagggtgcgtcttcacgagggtttgtaaacctgtttcaaaaccactcgcttatgtcatgaagataaaacgttttcactccagagtgtcttcactgcagccttggccttagtcgggcagggagcatcccggggtgggccgccctgtgagcactccaggcaaggaagtggctccagggagccattggtggtccactgtcagttatttccagcagggccattgggtacgtgagcgggccggggccaggacactagcaggtgctgtgaagacatgttggtctcaaaacgttttaggaatgctgcgatgctctgccatctgccgtgggtgtgtcgccataatcatcttccatgcagcccaagtggcgggtggtggtcccagctcccactcccctctggggctttcactgcttgcttcctggagcacatccatcccatagcacttcatcctggcagccagtgtgctagagcccatgtgcatgtccctgctcctggtggcctgcgtgtgcctggggcttgctaggtacactagtgaaactagtgggctttgggtcacggcagctctgtgcagggtgaaagggtgctcttcagacactctgggggctctgtgggagacactcccatggagacatttgggtgtggacacagcatgtccttgggcaggtggcaaaactgcttcccacgtgacaatggcgccttgtagagagctgccctgggcctgggtgtgtctgtgagcatgtgcgcgatgcttcgtagtctgccctgtttgtttgtgtctgtaggtgctgctgtggttttgtccactgcgggaaagtagtggttcttttaatgcaggagccggagcttctttttgatctgctgctatgacatttccactcacttgcttaaaacagtttcctttttgttccccctcctcccctagcagagcatcagtcgctaacacagtgagtccccagctttgcttccccctccgcaagtccctgggctaagtcttgggagataccttccccataagcgattgatttctccaggagaagccagactgggcccacagacaggtagctcttgacggagattccccggaagagctaggggtcgagctgcctagaatctgtcctgcttcccaggcagcacgtgtggaccggctcggggatagaaattcgtgtttggtgtgaagcagctctttccaactctctgggctcttgttttaaaagaaaagtattcttcatcttccattccatctccccaccttgcatcgtgttgtggattgtggtggtgtcagacctcttcccactggggtgttactctgggagctttcttttcccctgagtgaggaccaagagaatatgttctggagtcgagtgtccccgctggtcgtgctgtattgtagttgctggtgctgccctgagcacttccctctgccccgagccagtgctcctggggcagattagtccaaatcagtcccattggaggctctacccagcaggacttgtaagtaaagcactcagtccagattgcccttttggaagaggccagcattcagcagtagtaagtttgacaccttgcttttcccacctcccgcatgcgaggaccttgatgtgctgcatccacttggctggctgctgtgtgccaccgccaccagcagagtgacccagtgatgtttgtctgttacagatcacggatacacgactctagccaccagtgtgaccctgttaaaagcctcggaagtggaagagattctggatggcaacgatgagaagtacaaggctgtgtccatcagcacagagccccccacctacctcaggtaatgcgttcctggccagggcatctctggggacacctgtggggtcttttctgagactcaagaactggttgggttgaagttaaattgaaacactttttttttttttttttgagatggaatcttgttcttgtcgcccaggctggagtgcagtggcacgatcttggctcactgcaacctctgcctcccaggttcaagcgattctcctgcctcaacctcccaagtagctgggattacaggtgcctgccactatacctggctagtttttttttctttgagacagagtttcactcttgttgcccaggatggagtgcaatggcgtgatctcagctcactgcaacctctgcctactgggttcaagtgattctcctgcctcagcctcccagatagctgggattacaggcatgcgccaccacgcccagctaattttgtatttttggtagagacgagtctctccatgttggtcaggctggtctcgaaaccccacctcaggtgatccgcccgccttggcatcccagagtgctgggattacaggcgtgagccaccgcgcccggtcctgatttttgtattgaaacactttttaacagttccctctgtttttatacattttcttagccaggtttctaagtttcttctatatcattggaatttctaagaaacgtaagccaagtcctggattccggagaacagttacaaatgcttggaaagtgggactcgtggggcacagtggcttatgtttgtaatcccagcgctttgggaggccgaggcattgcttgaggccaggagtttaagaccagcctggggcaacacagcaagacctcatttcttaaaaaaacatgtaagtgggaccaatttgtcagaaaaatcagtggctcacataaactcacaaaagaaacaacaatagatttgaatgtataaaaacttagaacctggctgggcacggtggctcacacctgtaatcccagcagtttgggaggccgaggtgggcagatcacctgaggtcaggagttagagagcagcctcatccacatggagaaaccccatctctactaaaaatacaaaattagccaggtgtggtggcacatgcctgtaatcccagctactcgggagcctgaggcaggagaattgcttgaacccgggaggtggagattgcagtgagctgaggttgcacctttgcactccagactgggcaacaagagtgaaactccacctcaaaaaaaaacaaaaacaaaacaaaacttagaacctttagaagagtatttatagtaacaattaaaaaaccaagtaattgggaagttacgatgttgtatctagaatctatacatctagatttatacaacaaacttggataccccaacaaataggtaaaagatggtccataccttgaagtacaagggagtaaacaaacatggaaagaatttgccctcatgtgtaatttcaaaaattccaagcataagactgggcatggtagcttatgcctgtaatctcagcactttgggaagtcaaggcaggaggatcgcttgagcccacgatttgactgtgttgcccaggagaccagcctgagcaacatagtgagacgttatctctactgaaagttaaaaaaattagctgagtgtggtgatcacaccactgtcctctagcctaggtaacagaacgacactctttgtctcttaaaaaaaataaaaaacaggccgggcacggtggctcacgcctgtaatcccagcactttgggaggccgaggcgggcggatcacctgaggtcaggagttcgagaccagcctgaccaacatggtgaagcctcatctctgctaaacgtacaaagttagcctcgcatggtggtgcatgcctgtaatcccagctactcaggaaggctgaggcaggagaatcacttggacccgggaggcggaggttgcggtgagccgaggttgcgccattgctctccagcctgggcaacgagagtgaaactccatctcaaaataataaaataaaataaaaaataaataaataaaaaataaaaataaaaattccaagcataaaacaaaaaactggcaacataaggaattggggaaggtgtgatagaactgcactcatgtgtgctggaggtgctttttttttttttttttgagatggagttttcactcttgttgcccaggctggagtacggtggcatgatgtcggctcactgcaacctccgcctcctgggttcaagcgattctcttgcctcagcctctggagtagctgggattactggaatgcaccactatgcctggctaatttttttgtatttttattagagacggggtttcaccattgtgcccaggctggtctcgaactcctgacctcaggtaatcctcccgcctcggcctcccaaagtggtgggattacaggtgtgagccactgtgcccagccgggagtgccctttctgtaaagtatcctgacatcaaacttttttgttctctggcccattaataccacccctgggaatttgtcccaaagaaacattttcaaagaacaaaatgaatcagtaaacccactatatgtacagagattctctgtagcattgtgaataatactggagaatatggagtcgcttaagtatccagcctttaaggaaaggctaggttagtgacgggtcagccacttgaatggacaaaggtgtgacccatacatggtataattaagtagattctgcagtgacccgagacgggtcctgtgggtgagacgtgcagaatacaagattgtacccatctaccttgtgcattcagctctcaacaaagtatgcatttctctgcacaaagcccaaggagcattaagaaaaaggattattgttcagagtgatgtggttatggaaaatcttttttatgattcccctgaaaggtggcacgcctccaggctggccagtgttacagacgtgtgctttgcagattctttttcccccaagggatgtggtaagaacataaggatggcttggccttcccagggaagttgcagaaggaaattgtgtacatatggagggcactttaattctgcacatgtcagctgggaatcttttatggggcgataaaacagtttcttggtgatcatgtcgtgaggaacagctgcaggagtggaatcccgttgccctggaggtcaagtctttaggggtgggggctggcagaggtttgagggaagtggctttggctggctccacactactcagtcagcccaataaggggacttatggcaccctccccatcctgtcatcggacaatttgagcagaggctgggtgccctctctcagggatgctgggattgcaatggaaggaaggttgtttttctttttttttttttttttgagacggagtctcgctgtcgcccaggctggagtgcagtggcgcaatctcggctcactgcaggctccgccccctggggttcacgccattctcctgcctcagcctcccgagtagctgggactacaggcgcccgccacctcgcccggctaattttttgtgtttttagtagagacggggtttcaccgtgttagccaggatggtcttgatctcctgacctcgtgatccgcccgcctcggcctcccaaagtgctgggattacaggcgtgagccaccgggcctggcctgtttttttttattattattattttttttgagacggagtttcgctctgtcgcccaggctggagtgcagtggcgccatcttggctcactgcaagctccgcctcccaggttcacaccattctcctgcctcagcctcccgagtagctggaactacaggtgtctgtcaccacgcccgtctaattttttttgtatttttagtagagatggagttttattgtgttagccaggatggtctcgatttcctgaccttgtgatccgcccacctcggcctcccaaagtgctgggattacagacatgagccactgcgcctggccttttttttttttttttttttttttttgagatcgagtttcgctctgtcacccaggctggagtgaagtggcgggatctcagctcactgcaacctccccttcccgggttcaagtcattctccttcctcagcctcccaagtagctgggattataggcaccaggcaccacacctagctaatttttcgtagttttagtagagacggggtttcaccatgttggccaggctggtctcgaactcctgacctcaggtgatccgtccgcctcggcctcccaaagtgtcggggttacaggtgtgaaccaccacacctggccagaaggttgaattttatggcttagatttgcagattctgtgtatggctgagcatgttactcacattcactgtgtctagtgacacttgcattgtccacttgagttgatagctagacctggaaatgagaacttgctactgagatagggcaggatgagggggcaggggctcagcccaggctctaacgtatccagtcagaaaagaggaggtggtcaagatctgtggtttgcaaatacaggctcagctacctggaaatcacccgtggaagctgcaaagaacacatcttcttgggcccttcctcagaggtgggaagtcactccacctgggtggggctcaggaatgtgcttcttaaaattttgcattctgggtttgggtgttgtagctcacacctgtactctcagcactttgggaggccaaggtgggaggattgcttgagcccaggagtttgagaccagcctgggcaacatagtgagaccccaccatctctataaaaataaaaaaatttaaaaattgcactctgagcggccaggattaggaactatgacccagataggttgtagaggggacccctgtcttgctgtcccctctcatagtctctgcccaagctgattccatgttccccaaattgggtactacaaaatcctccctacccctaccagcgatcaaggggtagtcccagcctcagcatcagacgtgtaagtgattcccactttagaagggaaaagagttaaagggcccagagtccaggcaggtcttggccattgcttctgccctcccccaccctctggaaaggagaaggacctttgtgctgtcttcccgggtccctccttagagggaactgtcaaacgtttgtcggccgggcgcggtgactgacgcttgtaatcccagcactttgggaggccgaggcgggcggatcacaaggtcaggagatcgagaccatcctggctaacagggtgaaaccccgtctctactaaaaatcaaaaaacttagccgggcgtggtggtgggcgcctgtagtcccagctactcgggaggctgaggcaggagaatggcgtgaacccgggaggcagaccttgcattgagcccagatggcgccactgtactccagcccaggcgacagagcgagactccatctcaaaaaaaaaaaaaaaaaaagtttgtcatgacttgctctgaatggttgaatagttattgtggaagtggttgcgcaggtgttggggttacacagggaagtgacacacagtcgctgcctgctcctgctcacagccttgccagggaaaatggaaaagcacagagcacaacgggcacccaaatgctctcatctgtttcacccagccctggagccttagtttaaaacagcttttggtatttttttttttttttcgagataggatgttgctctctcgcccaggctggagtgcagtggttgatcccggctcactgcaacctccgcctcctgggttcaagtgattctcatgcttcagcctcctgagtagctggattatagacgtgtgccaccacgcctggctaacttttgtatttttggtagggttgaggtttcaccatgttggccaggctggtttcgaactcaccttttggtttttttttttttttttgagatggagtttcgctcttgttgcccaggctggactgcaatggtgtaatctcggctcactgcaacttctgcctcctgggttcaagtgattctcctgcctctgcctcctgagtagctgagattacaggttcctgccatcacacctggctaatttttttttttttttttttttttgagacggagtcttgctctgtctcccactctggagtgcagtggcgcaatgttggctcactgcaagctctgcctcccgggttcacgccattctcctgcctcagcctcctgagtagctgggactgcaggcgcctgccaccacgcccggctaattttttgtatttttagtagagacgggctttcaccatgttggccaggctggtcttgatctcctgacctcgtgatctgcccgcgtcggcctcccaaagtgctgggattacaggcgtgagccaccgcgcccggctacacctggctaattttagtatttttagtagagacagggtttcaccatgttggccaggctggtcttgatctcctgacctcaggtgatccatccgccttggcctcccaaagtgctgggattacaggcgtgagccaccgcacctggcctggtttcgaactcttgacctcaggtggtctgcccatcttgaccttccaaagtgctggagctacaggcatgagccactgcacctggtgcttttggtaaaagcaacctggaatttgggagaaaagatcaaacgcttcatgggacatgggttatttaaattaccttggatgtcacctctggaaggtatttatcaacccatcttctcaactcctactgctgtggaagctgagaggccagaggccttgcctagtccatctcaggatggctggtatgtctaaaatgacagcctgatcatgtctcttccttcaaaaccctggggactcccagccacctgctgagtaaagtcatctcacggagcatgtgagacctgtgatcggtcccctccctggggacctcctccctggactgcccctcagtctctcctacttgctgctgcccgtgcccctccccgcagtgaaccctgactcagtgtctaaggctgtgctctattatccactcctctgggaagtctcccccttgtaccacttccccgcatccaggaagtgcttccgtggagccatgcctggctcatagtgcagtacaccatggccgtgctgtgtctggtgcccctacgtacccttgcccttgcccaggtgcctctagcatctgatgacagcctggggactaggctcctgcaaagtcaggtgcacagacaactcccatgggagcctcgagcctgacagaggtacagtgggcatccctggagcattagttgattcctggtgggcaggatcaggctcctatactgactgggaggacttttcttgtatctcctcagggaacagaaggccaagaggaacagccagtgggtacccaccctgcccaacagctcccaccacttagatgccgtgccatgctccacaaccatcaacaggaaccgcatgggccgagacaagaagagaaccttccccctttggtgtggatgcatcgctgcactcaccctccgtgctgattccgccttagttctccagcacgtttcagttccttcctccccagaaaaacactctgctttgaccttgtgctccccacaacgccacagtacctcctcgcctttgaactgttgtgtttccctgacttccaggacattgtccatagcctccttggctctgtctgctgtcaccttgccatgtcctcctcacctctctggccgctcaagtggagttactcagggcgcggtccttgggccctttctctgccctcagtttcacatgagtgggccacagccagtctgatggtgcagatgccatccacgtgactcccactgtgccaccatttcccagagcctgctggagtaaaccaccacaaactggtggcttcgagcagagcacatttcttccctcacagttctggggcccaggagcctggatttagtttcactagaccagactcatgtgtggacagggccatgctccctccagaggccatcgaggcgattcggtccttgcttcttccagctttgggggctgccacgttccagtctcagcctctgtggtcacgtggccttctctgcatgaaacttccctgtctctctcttagaaggacacttggcgatgtaatttagggcccttctggttaatctctcaggatctttcacttaatcgtatcttcaaagtctccttttttggccatatgagctgacagtcacaggttttggggattaagttgtagatgtcttcggggtctgttttttacctctgtggcccagacttcctcagctgccctcaccccctcagcctcatgctgcctgaagacctctccatctcggcgcgtggagatccagccctctccttgctcaggctgtaggtttctttcccaaggcctgccttttcctcacacagcaagtccagtctctccaggttctcccctgggactgcctcagacagccccccactgctctccctggggtctctagcagcccctacctcccttccctgctgccttctcagctctgcagctggtgtggcctctgctccaggcagatcatgtcacctctccacgcagaatcctccaggctccccatcaccctcggagcagaagcaggagttctcactggggtgccaggcccaacctggcctggtgctgccaccgctgcactctgccccactcaccctgcctcaggcctgagaacgtcctcattgctgtcagacctcccagagctcctgccctgcagttgcctctgctgaggtttagccccgttctccctcctcccctctttcctttcctccttccttccttccatcattcctccttccctccctcccatcctaccccctcctccttttccttctgtcttccttccctctatctcctcttcccatccctagttgactgtccccttctcccttagagtggccaccccttttctgcagcatccctgcccctttccctgtctgtttcccagcgcattcatgcctggcactcagctcacttttctctgtcttccatctacctcccaaggtcactgggggcctttcgcagccctctccatgctcccagacgcccttaggtgtcctgtgtcctccagctccatttcaccaacctgcctgccggactcttccctctttatcttcccaaagtactccattgcttggaatcctcctgggactccctcagggcagtggccagtttgcatagcctgagggaagaactgtgggtgcttcgacacccgctagctttgcagcatccctgaccactgctcctcacggaatctgtgctctgtggtctgtttgtacgtcctcagcagttcctccattcacctgccttggccttgctagaatatttcctcttctggaaatgcccttctcctttcccatagccttccatgaaagtcctgccaaatttcaggcttaaatatcccttcacaggatgtctgggtgttgttccaacactgcccaggtcgattctattgcagacagactggtgcttgttatttatggccccaactgtccccattagaccgtggccccgggacccctgctagcctcgtctgctgcctcagctgttagctgacaagcggccatcttccccagatgggtttgcagaggcctgctgtgcagagagagaggctgaaaatttgcatacctagggctccggccccctcgctgactgttgcttccatttcactttcagctttgatgaccatgacccagctgtgatccatgagaacgcatctcagcccgaggtgctggtccccatccggctggacatggagatcgatgggcagaagctgcgagacgccttcacctggaacatgaatggtacaaggcagtcgggcttggctgggcctggccccaacccctgtgtgttacgtgggaacagtcccctttcctgccagctgcctgtcaggcagattctggacctgacacgcaggacattggggcatagttttggagggtgtgggctctgggttcagtcctggttctgttgctgttcactgtggattgggcctgtgaactttggactctttccccatactgaggttgggtggcccaagaggcctggcatgggaggcggctgatctgcatagcatggatgatgatgacaatgccagtcagacctagttcagcccccgagccctgcacacacctgccttgggtcctgtccaccactctgcttctgctgtgtgaggctgcatgtgtgccccgtgcctctctcctcctctaactggtcatctctagacatcctcactctgtaagtcctgggtcagatgccatctcttctggctcttcctgggcttccaaagcctggacagaactcggtctttgtgcaaatgtagacagaaaggttagaaggatatgcatcccaggtgtctagactgcttatcccatctgggagggtggatcatgcatgcatttattgttttctctatttttaagtctgttagaatgtatttttattattttattttatgattactgtttttttagatcttgttgcataccagttttttttttacttagtgtctgtatcctgctgaatttttataatgaacatactatttatattcagacaaaatgcagtgaatatcatctttattttacttatttttttttttaagagacagagtcccactctgttgcccaggctggagtacagtgatactctcatagctcactgtaatcttgaactgcctgggctcaagcagtcctcctgccacagcctcccaaatagctaggaatacaggtgtgcaccactgtgccaagcgttatcatttttaaatgagtaaatgtttaaaatcatcagaatctcaccacctgaataatgttttcagttttaccttttctgtcaattccacatgcaaacatatttaacatagttgtcactatagagcaagtatcgttttatttttcttcacttatcataagtatctttctggtttctcttttttttgggaggggagatggagtctcactctgtcgcccaggctggagtgcggtggcacgatctcagctcactgcaacctccgcctcctaagttcaagcgattctcgtgcctcagcctcctgagtagctggaactacaggcgcgtgccaccatgcctggctaatttttgtatttttagtagagatagggtttcaccatgttagccaggctggtcttgaactgacctcaggtgatccgcctgccgtggcctctcacactgctgggattacaggcgtgagccactgcacccagcctctttctgatttctttaatcttcaaacaatgcagcattttctcctgggtcaaggcgcctttgtttgctaaaactccccctgctgtagacggctccacagcagataacgtagttgcagcatttttctctcagaagggatttcctaagggaggagagtatgagtggttgttgatatgtggctgccttgagctttctgaaggattaggctgcttcctttggtcatccccaggcgctcagcatggtaggcctgagtgctaggcctaccacttgctcacaccagtgccaggcctgagtccaaaggcctctgctcagccctgagaagaaggcctgagagccatgtgccgggtgcttgtcccgtaggtcccacaggtcagctggtgaggggggacgccagtgggaggagacatgggtgagggaggacactggcaagagactccgggaggttgtattgagtgtagatggggacaggtacagttcactggtcatgccccagaacagggacaggacagcccatggggaccaggccaccagtgctgcacaatgcctgttatctctgccaagctccccgtttatctctgctggcccacatcatagttatttgttaattcttttctctccctctccatttcaaccctttaaggtcaggggccttgtttttcattgccgtttttcttcttttttttgagatggagtttcactcttgttgcccaggctggtgtgcaatggcgtgatctcagctcaccacaacttccgcctcccaggttcaagtgattctcctgcctcagcctcccgagtagctgggattacaggcatgcgccaccatgcctggctaattttgtatttttagtggagacgggatttcaccatattggtcaagctggtctcaaactcctgacctcaggtgatccgcccgccttggcctcccaaagtgctgggattacaggcgtgagccaccgcgcccggctgctgtttctcttaacatagaatctagcccagcataggaacttagtgttccaattggatcagtccatgctctgtctcgttacctttctttgggcaacacatagaaagttctggtttgtttatacccccgccctgttccagaaaggatgcaaggaagcttaccataagtacactgggcccaaatgactaaagcaaatgaaaacggagtggttaggaaaaactggataaagaggaaatgttcaagttgaagagggagctcgtactcagcttttatttggtgaacgttgctgggagttgggcgtggctctgggcctttttagaaccaggcagaatgagacgtgaaaatcatttgcatactcagtgtggtcaaggttagcagcagcctgtggctctgaagaagtagaatcacacgtggtcctggaatctgagatttcctacagccctcaggaagagggcacagtatagtaaggaagaccaggatcgtccatgaactccacagtgagtttcactgggctgttcctcctaggagttctaatgtaaaatatgatgcccactgaaagtaatttagaacaaagtcttaaccagtggagaaccaaaatagtgttgttctgcgaactcttcctcagctctgggtggtatttggcatttgtaagagctgtgattcttaattggtggttagatgccatgccaaaattgttattgatttgctttgaaatttcagatcatcttaaaggtgggcatgagagtctttatcacagagggattaaatatgtgaagtagcagtacttgagtagcacgaatgaagtgtatgttcagcccaccttcagaatcaggattggccaggcgtggtggctcacgcctgtaatcccagcactttgggagggtgaggtgggaagatcacttgaggccaggagtttgagaccagcctggccatcatggtgaaaccccctctctactaaaaatataaaaattagtcggatgtggtggcacacctgtggtcccagcaacctgggaggccgaggcacaagaatcgcttgaacctgggaggcagaggttgcagttagctgagattgtggcattgcacttcaacctgggcgacagagtgagactctatctcaaaaaaaaaaaaaaaaaaaaaggaatcaggatttttctcaggtttctggtaggtgttgtgatgagtttgaggttattttctctgaaaaggacttgaagtagtgcttctctgaatcactggtgatgtatggtgtcacctggcttaacagcctgctgagggagggaagtattaaaatcctccagaaaagatgagttgcctaaccagaacacatgtggacatagatgccatcttcacccagaaggggaacaaggggatcccctcaggaagagttttggaatctgtcttggcacacaggcaaaggagtgattagggccctgagtgtctacacttggctacagaaggcaagtttttagagatttatatccacatgcttgttttgggctctaaaaaagttaaatgaggctgagcacagttgctcacgcctgaggctgaggtgggcagatcactttaccccgggagttcaagaccagcctgggtgtcacggtgaaaccccatttctacaaaaattcaccagatgtggtagcacgtgcctgtgatctcagctacttgggaggctgaggtgggaggatagcttgagcccgggaggttgaggcttcagtgagccgtgattgagccactgcactccagcctgggcaacagagtgagaccctgtctcaaaaactttttttttaaagttaaaaaaaaaaatcaaatgatagattcaggaagccaagtgaagcccaacatgattaacccaaagcaatccatgccaagacacatcataattaaacttctggaaactcaacacaaagaaaaaaatcttgagagcaatcagagaaaaaggacaacttacctgtagggaaaagacaataagaatggtggtagatttctttttttttcttttttttttttttgagatggagtcttgctctgtcgcccaggctggagtgcagtggcatgatctcggctcactgcaagctccgcctcctgggttcacgccattctcctgcctcagtctcccgagtagctgggactacaggtgcccaccaccacacccggctaattttttttttttttttttgagacggagtctgtcgctcaggctggagtacagtggtgcgatctcagttcactgcaagctccgcctcccgggttcatgccattctcctgcctcagcctcccgagtagctgggactacaggcgcctaccaccaggcccggctaattttttgtatttttttttttgaaacggagtctctgtcgcccactctggagtgcagtggcgcaatttcggctcactgcaagctccgcctcccaggttcacgccattctcctgcctcagcctcccgagcagctgggactacaggtgcccgccgccatgcccggctaattttttgtattttttagtagagacagggtttcaccgtgttagccaggatggtctcgatctcccgacctcgtgatccgcccacctcggcctcccaaagtgttgggattacaggcgtgagccacggcgcctggccaattttttgtattttttagtagagacggggtttcaccgtgttagccaggatggtctcgatctcctgacctcgtgatctgcccgcctcggcctcccaaagtgctgggattacaggcgtgagccactgcgcccggccaaatgatggtagatttctcatgagaaactggacgctagagcaagtggcaggatatttttcaagtactgaaagaaaagaactgttaatctagaatcctgtacccagtgacagtattgttcaggaatgaacgatattggacattcttttttttttttttttgagacggagtttccgctcttgttgcccaggctggagtgcagttgcacagtctcagctcatcacaacctctacctcccgggttcaagtgattctcctgcctcagcctcctgagtagctgggattacaggcatgtgccaccatacccggttaatttttgtatttttagtagagaggggtttctccatgttggtcaggctggccttgaactcccacctcaggtgatccacccaccctcggcctcctaaagtgctgggattacaggcgtgagccactgtgctcggccaattttttgtattttttagtagagatggggtttcaccgtgttagccaggatggtctcgatctcctgacctcatgatctgcccgccttggcctcccaaagtgctgggattacagacgtgagccaccgcgcccagccaaatgatggtagatttctcgtgagaaactggacgctagagcaagtggcaggatatttttcaagtactgaaagaaaagaactgttaatctagaatcctgtacccagtgacaatattgttcaggaatgaacgatattggacattctttttttttttttttttgagacggagtttctgctcttgttgcccaggctggagtgcaatggcacagtctcagctcaccacaacctctacctcccgggttcaagtgattctcctgcctcagtctcctgagtagctgggattacaggcatgtgccaccatacccggttaatttttgtatttttagtagagaggggtttctccatgttggtcaggctggccttgaactccccacctcaggtgatccgcccacctcggcctcccaaagtgctgggattacaggcgtgagccactgtgctcggccaattttttgtattttttagtagagacggggtttcactgtgttagccaggatggtctcgatctcctgacctcgtgttccgcccgccttggcctcccaaagtgctgggattataggcatgagccaccgcgcccagccgaatgatggtagatttctcatgagaaactggaggctagaagaagtggcatgatatttttcaagtactgaaagaaaagaactattaatctagaatcctgtacccagtgacaatattgttcaggaatgaacgatattggacattcttagtcaagacattcttagatgaaagaaaactaagtgctgggcggggtggctcatgcctgtaatccctgcactttgggaggccgaggcgggcggatcacgaggtcaggaattggaggccagcctgaccaacatggtgaaaccccatctctactaaaaatacaaaaacaattagccgggcgtggtggcgcatgcctataatcccagctacttgggaggctgaggcaggagtatcacttgaacccgggaggcagaggttgcagtgagcagagattgcgccattgcactccagcctgggtgacagagcgagactccaactcaaaaaaaaaaaagaaaaagtaaactatcccctgcagaccttccctaaaagagtggctaaaagaaaggaaatgattgccggcatggtggctcccacctgtaatcccagcactttgggaggccaaggcaggcggatcacaaggtcaggagtttgagaccagcctgaccaatatggtgaaaccccatctctactaaaaatacaaaaacaattagccaggcatggtggcgcacgcctgtagtcccagctactcaggaggctgaggcagaagagtcacttgaacctgggaggcggaggttgcagtgagccgagatcacgccactgcactccagcctgggcaacagagcaagactctgtctcaaaaaaaaaaaaaaaaaaaagaaagaaaggaaaagattaaagaagaaacattgagacatcaggaaggaacaaaagaaagcatgataagaaaaaatgtagataaataaaatagactttcctctcctcttgggtttaacaaattatgtttgacagttgaagcaaaaattgtaacagtatctgatacggttctaaaggtatgtagaaagatttaaggctttaaggctgggcatggtggcttatgcctgtaatcgcggcattttgggaggccgaggcaggcggatcacctgaggtcaggagttcaagaccagcctggctaacatggcaaaaccctgtctctactaaaaatacaaaaattagctgggtgtggtggcgggcgcctgtaatcccagctactcgggaacgggaagctgtggcagggataattgcttgaacccgggaggtggaggttgtgttgagctgagatgacaccattgcactccagcctgggcgacagagcaagactgtgtctcaaaaaaaaaaaaaaaaaagatggataaagataaaacgttaatcaaaggaaagcaggagtgacaatgttagtatcagtaaggcagacttcaaagaaaatgaccagagacagagaaggacattaaataatggtaaaaagataagttcatcaagacatagcaatcctaaatatgtatgcagcaaacgacagagctggaaaatatgtgaaacagtatcagatagaaatcagatagaaccaaaaggagaaataaacaaattcacaatcattggagacctcagcattcctctctcaacaaccgatggaactggatggaaaatcagcaaaacgatgtaagatcaaaaacactatcgaccaacagaatctgattagcatttatagaacactccagcacagccgaatgcacattcttttcaagtgcctgagcaacatataccatataatccgtataatggatcataaaacaagttttaacaaatttaaagaattgaaaccatacagagtgtgttctccaaccacaattgactcaaatacttgtaagctaaataacagacttctaaataatctgtggttcaaagaggaagtctgtagggaaatttaaaaacatacacagacctaaatgaaaatgcagcatatcagaatttgtgggataaagctaaacagtgcaatacagattatctgtagcaccagtgcgtacattggaaaacaggaaaagctttcctcaagtcgataatctaagctctaatctcaagaaccaagagaaacaaaaccaaaggaagcagaaggaaggacatttgaagagcagaaatcaatgacattgaaaacagaaatcaaacaatagagaaaattaatgaaaactagctggttttttgaaaaattaataaaactggcaatctctagcaaggctgacaaaaagaatgtaaattatcaatatcaggaatgaaatgggatgtcaccacagaccctgcagatatcaaaaggaatactgcaaacaattctataagtttgacagcttacacaaaatggattaatttcttgcaaaacacaaagtaccacaactcatccaatgtcaaatagataatttgagttgccctataactattaaggaaacagaatttgtaatttaaaaaccccaaaaaatggccaggcacggtggctcttacctgtaatcccagctctttgggaggctgaggtgggaggattacttgaggccaggagttcaagaccagcctgggctacatagcaggatccaatctctaattaaattttaatataaaacattattttaaaaaaggaaaacaattctcccccccaaaaaaatctctgggcccatatgatttcactggagaattctgtctatcaaatgttgacgaatgagttaacaccaattctacacaatctcttccagaaaatggaagaggagaacgcacttcctgatcaattttataaagctcgtattacctagataccaaacctaaagacagtaccaaaaaaagaaaaatacagaccaatatcctttatgactaaagatgcaaaatccttagcaaaatattgcgaaatagaattcagcaatatatagaaataattatatactgtgaccaagtgggatttattgcagggatggaaggctgggtcaatatttgaagctcaatcaatgtaatccaccatattaacacactaatgaagaaaaatcacaggatcagatcagttgatacagaaaaagcattttgtagaactcaacacctgatgataaaaatgctcagaaaaataatagcaggaaacttcctccatttagtaaagagcatctatttagtacaaaaagtcctgttgctattttttttttttttttttagacggagtattgctctgttgtctaggctggagtgcagtgccatgatctcagctcactgcaaactctgcctcctggattcacaccattctcctgcctcagcctccctgatagctgggactacaggtgccctgccaccacacccagctaactttttgtatttttagtagagacggggtttcacagtgttagccaggaatgtctcgatctcctgaccatgtgatccacccgcctcggcctcccaaagtgctgggattacaggcgtgagccacagagcctggccttctgttgctagcatttaatagtgaaaggttgcatgctttctgccagagaccaggaacaagccaaatatgtctgctgtcactattcttattcaacatagtgttggaagttctagctaatccagtaagctgagaaaaggaaataaaagacgtgtagattggaaaggaagaaataaaatcctatttgcagatgacatgattgtccatgtagaaaatcccaagggatctacagaaaacttggagaactaataactgaattccccaaggtcacaagatacaagggatacaaggtaaacatgcagaaatccattttatttctatatgccattaatgagtacctagacacaaattaaaaatacattaccatttatcatcactcaataaaaaaaggaatacttaggtataaatccaacaaaacatttacaggacttatataccaaaaactataaaacactgacgaaagtaatgaaggaagacctaaataagtagacatatcatattcatggattaaaagactcaagatgatgtcagttttccccaaattgatatacagatttaatgcaatttctgtgaaaatcccagcaagattttttttgtagataagatggttctaagatttatatggaaaggcaaagaaactaaaatagctaaagcaatttatttattattattattattattttttgagatggagttttgctcttttgcccaggctggagtgcagtggcatgatctctgctcactgtaacctccaccttccggtttcaagcgtttctcctgccttagtctcccgagtaggtgggattacaggtgcccgccaccatgcctggctaatttttgtatttttagtagagacagggttttaccatgttggccaggttggtctcaaactcctgagctcaggcagtccgcctgtctcagcctcccaaagtgctgggattacaggcatgagccaccacacccggccagcaattttgaaaaacagtaaagtgggagtaatcattctacccaatctcaaggcttactatatagctacgataatcaaggctgtgtggtattggtggagtgacataccgtgatggaacagaattgagaatccagaaacagacccacacaaacgtgccctcctgatttttacaaagatgcaaatgtgattcaatggaggaaagacagctcattcaacaaaatggcactggagcaattagacaatcataggcaagtaggctggcacagtggcttacgtctgtaatcctagcacttcgggaggctgaggtgggcagatcacctgagatcacgagttcgagaccagcctgaccaagatggagaaacctcgtctctactaaaaatacacaattagctgggcgtggtggcgcatgcctgtaaccccagctactcgggcgggtgaggcaggagaatcgcttgaacctggaaggcagaggttgctgtgagccgagatcacgctgttgcaatccatcctgggcaacaagagtgaaactctgtcccaaaaaagcaacaacaacaaaaaaggctgggcacagtggctcacgcctgtaatcccagcactttgggaggctgaggtgggcggatcacctgaggtcaggagtttgagaccagcttgaccaacgtggagaaacctcgtctctactaaaaatacaaaattagccgggcatggtggcgcatgcctgtaattccagctacttgggaggctgagtcaggagaattgcttgaacccaggaggccgaggttgctgtgagccaagatcacgccgttgcgctccagcctgggcaacaagagcaaaactccgtctcaaaaaaaaaaaaaaaaggcaaaagacaggaagagaaatttcactaaagaagttatataggtggcaaataaacattgaaaagcttttccacattgttagccttagggaaatgcagattaaaattacactgttattccacatctttaaaaagtggtgacagcatcagatgctggcgaggatgtggaggaactgggtcactcacaagctgctgatgggaatgtaaagtggctggaaaactgccctagaaaacagtttggcaatttctgttaaaaactaaacatgcggccaggcgtggtggctcacacctgtaatcccagcactttgggaggccgaggcgggcggatcacgaggtcaggagatcgagaccatcctggttaacatggtgaaaccctgtctcttctaaaaatacaaaaaattagctgggcgtggtggtggctgcttgtagtcccagctactcgggaggctgaagcaggagaatggcgtgaacccgggaggcggagcttgcagtgagccgatatagcgccactgcactccatcctgggcgacagagcgagactccgtctcaaaacaaacaaaaaactaaacatgcaaccagtgtaccttgagcatttatcctggagaaatgaagacatgtttatacaatagcctacacgtggatgttcatagcagctttatttataatagcgggaaactggaaatgatctagatagccttcagtgagtgaatagttaaagtgaggccccttcgtaccacagaatgtcacttggcagtaaaaggaagtgacaatctggatgaatcactggatacagatacagtcctctatcttgtcttttttggaggaaactgggcgcagtgtgcatggaatttctctgtgttgtttcttgcatctgtacatgaatctacaattacttaaaaattttaaaatgctctgggcagtgtattcactgggtgtttaccccgtgcacctgaggttcctgctgttgctgccccgcgggctgttaggatgctggtctccagcgtgtctttagggcagggaggagatagtggggctgtggtctgttaggccgacctgcttcttgatgatggaatcctactgtctgctctgagggaatttttcttggctttttcagcttattcctgcaaggcgtcttgtcagtaaggtctgggtggagcagggagagaatgttgactgagaggaccttgctgaggtctggctggccacagatggtccctgtgagctcccatctggtacaattccttttccaggatccgggatctgtagggacctccacgcttgtgaccttgttgaggccctgctgctgctactgcagtcacaggcctggaaatcgctgtggcttggcacagtgtgttttgctcacatgaggcctggtattgggccagcctctgtgccatcacgtctgccaccagttcagcacagaggggagtagagagatggcacgcaagctttgatgtgcctttgctggcctcgcctggatcatctcattagttgggataatctcatgcgcccacccagctatgagtggaatgaggggagtgtttatggccatgaccacccccagggcatggagcaggaggtctgtgcaggatgagggctgggggcctgctagtcatgtgcttcctccttccactcccagtttccaggaaggccacccccagtgccctggttgtcctctcctgcatccggagatgtttggcttcaaagaagaaggggtgagggaggccggtccatgcccaagcatggtgcaatctcttggcatcccttccctctcctgatttcagagaagttgatgacgcctgagatgttttcagaaatcctctgtgacgatctggatttgaacccgctgacgtttgtgccagccatcgcctctgccatcagacagcagatcgagtcctaccccacggacagcatcctggaggaccagtcagaccagcgcgtcatcatcaaggtaggtgacttctcacccagcactggagccttcctggccctcagggtgggtgtcatcatggagcactgagggtacaccaaggcctcagcagaagcccgtctttgggttccatatcatctggaaagtcataacacctggctttgctccctgcaatcccccaggaagggcataggctgagttctcttagtaaagtgttatattccggacacattcagggggtgtctctgaggcactgccaggctctgagcaaagcccggaggtctagaggaggtgaaggcagctgattggctgggccaggctgagtgctccagggtggcctagtaacccaataagatgctgccttagtggccatattacaggtgaagaggtgggcacgtggagagctgagatcacctgcggaagttgcaaactggccagttgagaaatggtgaggctggcgattgggcgcaggcctgcaccctgcagagcctatagcataatccttgctgtgctgagccgccactgccagactatgccttgagggtgaggggagctttgaaaataggaagatatgagaagtaggtgaaattggcacatgtgatgaccctaaaaaggtcagtggtttggttagatctgatgctgtgcctttggcttccattttaggaaaacattgatgtataaaaataagagccatgttacaaagggttcctgaaaatagtctttggggtcgaggagcctcgggagggatgcctcctgtgactgagggatgcctctgccccgtgcaccagatggagcctgggccgacttcttcccactgtggttctccgtggcactttactaagattttggaaaataacgtgggggaatcaccagcaacttcctctgtggtcccccaagtaacaaacaactaaatatcttatcttatttagttagtcaagacagtctcactgtgtcgcccaggctggagtgcagtggcacgatcttgactcattgcaacctccacctcccgggttcaagcaattctcctgtctcagcctcctgagtagctaggattacagttgcccgccactaagccaggctaatttttgtatttttagtagagacagggtttcaccatatttgtcagtctggtctcaaactccttacctcaggtgatccacccacctcagcctcccaaagtgctgggattacaggcatgagccaccgcacctggccgaaatactttgggtgtgtgtgtgtgtgtgtgtgtgtgtgtgtgtgtgtgtcgcagtctcactctgtcgcccaggctggcttgcagtgtgcgatctcagctcactgcaagctccgcctcctgggttcacaccattctcctacctcagcctcccaagtagctgggactacaggcgcttgccaccacgcctggctaattttttgtattttttatagcagagactgggtttcaccgcgttagccaggatggtctcgatctctggacctcgtgatctgcccacctcgacctcccagagtgctgggattacaggcatgagccaccacacctggccaatactttgttttcttgattaatattttaaaattgtggtaacattcataacataaaatttaccattttaaccacttaagtgtaaattcagtggcagtatattcacatccatggctgtgtaattatcaccaccatccatctccagaattctatcatcatgtaaaactgaaactgtccatcaaacactaactccccattccccctccccccacccctggcaagcaccattctgctttctgtctctatgaatttgactactcgaggtgtctcatttacattcctaagggaatcatgcagtatttgtccttttgtgactggcttatttcacttagcagaatgtcttcaaggttcatttatgttgcaccatgtcagaatttccttccctttttaaaatgtatttatttttagacagggtcttactctgttgcccaggctggagtgcagtggcgcagttatggctcactgcaacctctgcttcctgggctcaagtgatccacccggtgcagcctcctgagtagctgggaagctaggactaccggcacactccaccacacccgactgattttttgtattttttttgtagagatggggtttcgccatgttgcccaggctggtctcaaactcctgggctcaagccatctgcccacctgagcctcccaaagtgctgggattacaggcgtgagccactgcgcccagcctcctttcttattaaggctaaataatattctgttgtatggatctatcacatttttatttattcatccctaaatggacagacacttgggttgcttccacattttggctattgtgaataatgctgctatgaacctgggtgtgcaggtatctgttggtgtccctgttttcatttattcattcattcattcattcattcatttagatggagtctcactctgttgctcaggctggagtgcagtggcgcgatcttggctcatggcactcctgcctcccaggttcaagcaatctcctgcttcagcttcctgagtagctgggattactggcacccaccaccatgcccagctaatttttttggatttttaatagagaccgggtttcaccatgttggccagcctggtctcaaactccgcctcagcctcccaaactcaaatgatctgcccacctcggcctcctaaagtgctgggattataggtgtgagcccctgtgtctggcccctgctttcatttcttttgggtgtatacctagaaatggaattcctggatcgtacagtaattccatgtttagttttttgaggatccactatactgcctttctcggtggctgcaccttttatattcctaccagcaaggcgcaggggttccagtttctccacatcctcactcacacttgttagtttttcttttcttttctttttctagacagagtctcgctctgttacccaggctggagtgcagtggcatgatcttggctcactgcaacttccacctcctggattcaagcgattttcctgcttcagcctctcgaggaggagctgggactacaggcgcatgccaccacgcccggctaaattttgtacttttagtagagacggggtctcatcatattgaccaggctggtctcgaactcccgaccacaggtgatccacctgccttggcctcccaaaggattatagacgtgagccactgtgcccggccagtttgccagcatttttttgaggatttttgcatcaacattcataaggggtgtaggtctgtagttttcctttcttgtagtattttttgtctgacttaggtatcagggcaatgagttaaagaatagtttgagaaggattggtgttagctcctatttaaatgtttggtagatggccgggtgcagtggctcacgcctgtaatcccagcactttgggagaccgaggcgggcggatcacctgaggtcgggagttagagactacctgaccaacatggtgaaaccccgtctctactaaaaatacaaaaattagccgggtatggtggcacacacctgtaatcccagctactcaggaggctgaggcaagagaattgcttgagcccgggaggcggaggttgcagtgagccgagatggtgccactgcagtccagcctggctgacagcgagactctgactcagtcagtcaatcagtgtttggtagaattcaccaatgaagccatcaggtctaaggcttttctttgtcaggaagattttattattgattcagtctctttacttgttaatacctttttgagaggaatacaaatttgtttcagtttcacattatggccagctaggaggaaaagaagggacaatggtaggagagaagtggggtggggatgggagtggcagcaagcacctggcctgtgtcctgcatacggtctgctggctctggagggcagccctgagggctccactctgtgcttctctttgtcttgtaaacatgtggaggatgaggctgtgtgggctaacccacccagccacgtggttccaaatgactgggattggccacacaaggggcctcatgaagcctgactggtagcttcccttaacgtttttctcagaattgagcccattttcattgttgttgtcttgacggggcctgcagaggagccatacaggaagttgcccagcagctgtaatcctcctggggctgttccctgccccaccagaagaggcttccccagtgaccctctgacttacctgtgattcccacctgggggatggtggcagctggcaggttgagagactgtccccagccaggtgtcctgctctgccctttgggtcagaccagatgtcacagggtggacacagctggcccagggaagcctgtgttatgtgggacagactgcatttttcaggccagaggcctcctgggcaccgtgaccctgggaacagtgtcctgtcttgcccatgaggaatagaaggtcacacccagggtttcccatctataattgggactcagaagagctgggtatttctttcttccttccttttttttcatggctcactgcagccttgacctcctgggttcaagttatcctgccatcttggcctcctgagtagttggaactataagcacgtaccaccatgcctggctaatttttaaattttctgtaggaaatggagtctcggctgggcaccgtggctcatgcctgtaatcctaagactttggagagctgaggtgggcagattgcctgagctcaggagttcgagacaagcctgggcaacatggtgaaaccctgtctctactaaaaatataaaaaattagctgggcgtggtggcacgttcctgtaatcccagctactctggaggctgaggcatgagaattgcttgaacctgggaggcggaggttgcagtgagccaagattgcgccactacactccagcctgggcaacaggctcttcccatctcactgactctgtctcaaaaaaaaaaaaaagaaaaaagagaaaatggagtctcactttgttgtccaggctggtctcgaactcctgggctcaagcaactcttccaccttggcctcccaaactgctgggattacagacatgaaccactgtgcctggccagagctgggtgtttctgtaaggacgtcctttgtcttgatcctggaacatgactgaaggaaaacaagaatctttggagccatggcacatgaggaccatctctctcctcagaaagagtgccttaggttagagcagcatcttccagatattcttggcaatgctgggaccaaagcccaggcctggctgcccttgccagggcacctggcccaagtcggctttgcccagttccagcaggggttggggggcaggggaggaagctggggacatggtgctgctgcagtttgagccatcagaccctgtggcactgtccaggccccgtccagagagtgcatggggtgagatgtgagtcagggctggggaggtgggcaggggcctggccctgctgtgcacctgcttgggagtcctggccccgtcttagctctgtgagtccacctggagtccagcactcctcactaccccaccaaggccactgccagatggctcccttcctccctccccgccttccagtagaggtctcagcatggcagctcagcccatgtctcttgtctgcccaaaataccgcagaagcttcccacatccctctgtggaagccaagcctgtccaaaggcctcagggccctaactgctctctgctacagtccctcgccaccctcatctcctcccttttcccctcactgggcagatccgggtaccagaccttggctcctcagtcttttacatctctgtgtcccccacctgggactgttctcccccagggagccacattcctgctccctgggcacattcacttcttcctaaaggccaccttcctagaagccttcctggcctcctgacttctgaggccagcctggactttctccccctccctccctttcctccctggcactcccgtgctttctggtacaccacatgctcacttaacctacttagtgtctgtcagtgcccccaccagcatagctttttttttttttttttttttttttttttttttttttttttgacacagagtctcgctgtgttgcccaggctggactcaaacacctgagctccagtgatcttcccacctcagcctcccaagtaactgagactacagacatgtaccacctcacctttctcagaacagccttttgaatgtttgtctctcttgtgcctctccttggtagacacacagtctagactttggaataaatgaatgtgttagtgactgaatggcaggggacaggcaactccatccatgagcccagggcagggagggcttgctgggtgggagccatgtgcctatggtcctatggggtcctgttgggtggttccatgggctgtctgctgctgcacgttctttttggacccagcacccacgtggtttgcttggcattagattccagttgggaagggccagtgcctccgattccattcatcatcaggcgtgggcgtatgtggagatagcaaaggacatgggggcccgactgcagtccccattgcctggctgcatgccgtgtacaggacactgcagctctgccctcggcttcctccctctgcgtgaggattccttcattcccagaacaaatacaccctgcctgtgctagaattcctggaggcaaatgattcagattgtttcagacagtcctaagtgctgtgaagaaaataggagaggtgccagcatggtggcccgcacgtatagtcgcagctactcaggagactctcgggggaggatcttttgaggccagcctgggccaacacagagaggcagcagggaagcctgcggggaacagaaggctcaaccacagggtctcttctctgcccaaaacacttgatacattgcctgggccttgtagaaaccttgtctctacaaaatattagccagacatggtagtgcatgtccgtagttccagctactcaggaggctgaggcagaagggtctcttgagcccaggagttcaaggctgtagtgagtcatgatcatgccattgcactccagcctgagtgacagagtgacatcctgtctccaaagggggagaaaatggagagaagggtgtggaaaggggctgatgggaaggggagctctcaggagctggcactttagcttagaccaggatgctgagaagaggctggtcctgccaggtgaggggaagagcattctagcaagtgggtggtgatgtgcagggctcagaggcacagggctttatgaacatgatcggggattggggtaccctaatctctaaaaggaggcagaagtccccggaagggctggactccgaggcagtggtgagttttccctgcagctgcccaccctgatccttgacttaaaagctaagggccaacaatgaatgggcaggtgcactgtgacctggttgccctgtggagcactggatagcagtgagggatgaccccagccccacactctaatgggaggagtcttgcaagcatgatgcagagtgaatgaacctggaccccgaagtgtccatcctattcagaacagccacacctactcaaggggtgagaagtcaaaatggtgcctccccaggggggcaggtgtaggtgggagcccctggggtacagtctgtgttctctcagctgggtgctggcttcccaggtgtccactagtagaaaacccctgacagcacacccggggcctgggccctctggctgtgagtcacgtgctgcagggagtcctctggggaatgtggaggagctggcccagcactgtgatccctgcaggcttccctgtcccctcaccgtgttgacccagagtggggtgcatctgtgaacacgctaggcagggttttccgagaggggcaagctctgtaaagggcatagacattggctcaagacagggcttagggatgccttagctgagccctgcctttctggtgtagtcacgtaagaccgatggcagcaggagcgaagggcagaaaggaaggtccccaccagcacagggcacaggggagatgggatgaaggtaaggtgggactcaggtgcccccggggtcacttcagggcctcccgagggtgactgtgctgggccctgagccagagcccctcatggcagacagggttgtggggtcagccttgttttggggatggggaactggaaggacaaggaccacctgcagttctcagctggtggaccctggtgggcagggcccaccccaggcctggcagggccccgctcctcgcggcctccctgggctgcaaaagctctaacttgtgtcctttggttgttgcctcagctgaacatccatgtgggaaacatttccctggtggaccagtttgagtgggacatgtcagagaaggagaactcaccagagaagtttgccctgaagctgtgctcggagctggggttgggcggggagtttgtcaccaccatcgcatacagcatccggggacagctgagctggcatcagaagacctacgccttcaggtaggatcatgcatgagtctctccctccctcatctccctgcaaaactgttttgagaaaaagacttctctgtgtgagcggtgatacctttgaggctttctcacgcttcgcagcacaatctggctggggtctgtgtgtttgctccgtcctcctcctgccctatgtatctctccagggctccgctgtgccaggtagggttagaagcacctaacacaatagctggcaaagacttggagttctgtcagggtgaacctcaagtccttgcctccacggagccctggcctgcccccaccatccaccattcagttgtcctgccccacaccctctctctctgctcttgcccagactgttattttggtcagggtgacccctgcccagggttcttcatctgttgaacttgaattatgtcttaaacacaaaggcccgcccagcttttgagagtcaggggtccctagcagctccttcttactctagtatctctgcctttggtcagtcagagagcatttgatgagtaccatgctgggctggaccccatcctggctgccctggaagatagagacaggtcaccttgatccctgcctgtagcatttgggctggctgagatggtggaagtgtgaacagaatattccagtccagtgtcctctgtggtagggatggggatggacccgggagaggccctcctgttcctggcaggaggtgggactcagagttaaaagtgaggtcaaggcccagtgcgatggctcacacctgcagtcctagcacttcgcggagctgaggtggatcaccagaacccagtagttcaagaccagcctgggaaaaacatggtgagaccccacctctacaaaaaaaaaaaaatagaaaaaatgagccgggcatgttggtacatgcctgtagtttcagctactcaggaagctgaggtgggaggatcgcctgagctcaagaggtggaggctgcagtgagccaagatcacaccactgcactccagcctgggtgacagagcgagaccctgtctccaaaaaaaaaaaaaaaaatagcgaggttgaactctcccggctcagcaggactctaggactgggaagccccgtggttcctcaccctgtcctctgtgttgggatggggtgggggtgcagcaagcatccctacatcaaaacaggatgttcagatttagtctgctcatcagactatcatcatccacatctgcagtcatcactcagggatgacagcttaaaatgctacatgaggagcaaataggaaggtctgttttgcaaagccatgacaattaatggagctcgttaggtttgtgtctaacttgttttcccagacatcccaagagacagctttctatgacttcccataaatctgagcaaggaagaaggaatgagagccacccacggggctcaagggcccgggcctgggaaacagctgagtccctgcctgagcgccatggtgctgagatcctgtgacctgccccccagcagccctgccagtcacatggttctgcttcacagacagggcagcccagagaggaggctggggggctggtgtctgatgcctccctgttccctcggggtgttgcctgggagtgcagctgtagcgtccattcaccctgcacagagccaagccctatggccggagagccagtcaagggtggcctccctccaccagagttgactctgaggccccgggaggcagtcatgttgcgcgcatcaacactgagcacctcctcccgcagaggctgatccagtcagaaccctcgtcttgggctcacaggtgcaggtggtaggctggctgcccccagcatccagcccctacggtgttgaccttcacctagtcctgcagccgctgccagtgcccacagtccagggtcaggaactgaagtccccggggcctcttgacaggtccttgcaacatcccttctttcagccaccatggcaccatccctcctgctctgacccgaaggtgacctgagcctaaattcctttccaagttccgggccctctgcagtttgcagagtggctccagagcagaccccctggggagtccctggtggtggcaggtcaggatttagaggcagaggcgggccccttctttatctcatcgaccacttagtgcattccagttgcagggcctgggggcatcacagaccccctgctccctgctctctcttatgctgagaatgcaggtttcaaatctttggggttaaaggcaaaggccatcccgctgggaccaaggtgagcacacgtccctatcacagcagccagatggagaggcggcctgcctggggaactgggaagtgtcctgagtgggcttttagcatcaggagggctgcgtgtgtcttcccagtccccacactggaagacagctgcaaggataggacagggccttagggttgggctgtcatccctgactccaactcgcgttccccccactgtaccaccccaccccatgggatcttaggagggacttcgtttaactctgtccccagggagaccagtgtcagtcctgcctggccctgcctggggaaaggaggctgggccactgagtccccaggtccaggggccagtcagcccacagagagctagaccaggagtcctggcctggtctctgccacacagaaagcttggcaactgctgtgtcacatgactttttgttttgttttgagatggggtctcgctctgtcgcccaggctggagtgcagtggcgtgatctcggctcactgcaagctctgcctcctgggttcacgccattctcctgcctcaggctcctgagtagatgggactacaggtgcccgccaccacgcccagctaatttttgtgtttttagtagagacggggtttcaccgtattagctaggatggtctggatctcctgaccttgtgatccacccatctcggcctcccaaagtgctgggattacaggcgtgagccaccgcgctcggccacatgacttcttaagaagggttttcaggctaggcatggtggctcacgcctgtaatcccagcactttgggaggccgaggtgggcggatcacctgaggtcaggagttagagacaggccaacatggcaaaaccccgtctctactagaagtagaaaaattagccaggtgtggtggtgggcacccgtaatcccagctactcgggaggctgaggcaggagaattgcttgaacccgtgaggcggagattgcagtgagctgagattgcaccattgtgctccagcccgacagagctagactccatctcaaaaaaaagggttttcagctctggacctaggtcactccataatggaagcactcgctgattccccaagagccagtccctccatctctcccagccagagctcagtgcctgacttccataccctcctcggcagtggggacattgattggatccatggtacagtggggcaagctgctggccacaggacatgtgtgtgcaaggccactatgcccacacctcaggggaaccagggcagagaacagcctgttccctttggcagtgggacagacaggagacaagcatgaaggggaaacaggggcatgtgacaaactggtcagaagccctaggctcctagaggacagactgggaccagagtgacacaggcgtcccagagccagtggagtgggatgaagggccagcgaaaggagggagacagggctcaaggggaaggaggctgggctaggcagagcctctgaggagagctgatcctgcaaagttactggcacctcccctgggccagccctgtgttcctggccagggacgggaggagacagtgccctgtctggcagaggaaacagattcatgtgcatgactatcagtgtgccatggccacagaaagcaccggaggctgtgggcatgaggaagggcagttgggggcatagaacctggggtgaggatggccagggcaggtgctgatgggggactgcagcaggaaggaccgagaggagaccagggacaggcaggtgcttgagaaggaaggtgggccctgtggatcaggcagggtatctgccccagggggctctgcacaccagcagtcctacacgtacagggtggggatgaaaagagactaagggtcagggagcttggtagctgggcctgcatgagggacagagaggcagtgtccctctgatggcacagcatcaggaattaggctggggtatgtcaggtacacgttgggctggttgagcgtaagcctcaggttccttccgaagctctgcccgccagccctggcctgatgtcaggttttgtttgtttttttaacagctttattgtgatataattcataaaccatacaattcacacatttagagtatatagtgcagcggtttttgatatatgcagagagctgtgtaactatcaccactgtcaattttaggactttttcatcaccccactgcaggcagtcccgttcctccccgctgtctctcagccctaggtgtccactcatccactttctatctgtagatttgcctattccgggtacttcatagaaatggaaccatctaatatgtggtcttttatgactggcttgttagcataatgttttcaaggattatccatgttgtagcatcttttatcaggacttcattcttttttatgattgaatattatctcattgcatggatataccacattttattcattcatcagcagattgacttttgggttgtttccatttttcagctattgtgagtactgctgctgagaacatttgtgtatgagtttttgtgtgaacatctgttttcaattttcttggatatatacccaggagtagaattgctgggtcacgtgacaactcagtggttagcattttgaagaatttctagactgttttccaaagtggctgcaccattttgcattcccaccagaagcgtgcgattcccgtttctctggatcctgctggcatttgctgttctctttttgatcgtagccgtctgaggaggtgtgaagtaattgtggttttgatttgcatttttctaatgactgatgatattgagcatctttgcatgtatttctggctgtttgtgtatcttctttggagaaagtgctttgctagtttcttaattgggttttattttattgttgagttgtaattgttctttatatattctacatagaagtccctcatcagatagatacatgatttgaagatattttctctcatttggaggattgccttttcactttcttgatagtgttctttgaagcacaaaagttttcattttgatgtagtccaatttatctttttttttttttttttttttttttttttttttgagacagtctcgctgtgtcaccaggctggagtgtagtgctgtgatcttggctcactgcatcctccgcctcctgagttcaagtgattctcctacctcagcctcccaagtagctgggactacaggcacctgccaccacacccagctaattttttgtttttagtagagacggggtttcaccatgttggccaggatggtctccatctcttgacctcataatccgcccgcctcggcctcccaaagtgctgggattacaggtgtgagccactgcaccaggcctgtaatttatatattgttttagtttgttgctagtgcttttggtttcatatctaagaatccattgtcaatccagagtcatgttgccccagcaccatgttgaaaactgctcttcctccattgagtggacttggcacccttctaaaaatcatttgaggctcctggcggcctcggaggtgtgaattgcaaacataagggtgacaccaagttttggcatctccccttcctggtcgagtggctgtggacaggtcattttcccttgaagtctgtattttgtcatttgtaacttggggataatacttgtgtgttgcatcacatgaggtcatgaaagtgagatcacattgaaagtaaacctcaagatactcgaccggcatcagtcctggctccctctgtccctcagacgtgagcatcccctgcctgggtatctttgtccccacctggacactttgggtggtaggaaggtctggggtccctggcggcttcgaagcccgtgaaccagaattccctggaaggaatggggagcagggtggctcccagggtccccagcactctttggaactcaggacagcatctccatgcccacatgcccccaaaacccaaggcaggctagtgctggctctaggcccgttcttacatggttggtgcgagcatttcttactttagaacaaacccactggagtggaatattcccagcatcaaggggaggtaaacaaaggaccctctgggacccactcgccagctcttgtttaagaggaaaacatgttttgctcccctcgttgtgggcttggtacctttcacgtctgccctccaaggaaggctgctgggagccctcacggtgaggaatgatgtttggggtctgaggctggggtggtccctagactgctaaaccacccggtgctggccagggaccagctgtcaggagctgctgaggatgggtcagccccagagggtgggggtgccgacattgcctctggccctgcctctgcgtcaccagtacgagcttgagcttctgcgactcatgagcatggacctggtgggctgagcttcagctgtgaggggtcaggcctgctgcagggagagccagctgcagccagtgccctgcgctgtgcccacagtccctgagaccccaggctgaggagagcagcactgagcccaacctggaacgggctcacggctactggagctgggtgtgtgctcactggtgtggatgtgcagagccgggactcgctctgcaagcaggctggtcccacaaccttgagccacccgctacagggaggctgtgagaaggtccctggcccctaggaagctccctcagtggagatgttttggctgctttaataacagtcatccttccaaagcccttcacagcaataaatgtttccatattccagatgaggtttgcagggacctgtcctctctatcagtgtccacctggcgcctcccccgagtccggcctgcccttgcttctcccagagctcatggtgtttttcagggccgcaggctggcagggtgtccttctcccaggggactgagcctagggagagccaagtggaggtgcccaagtggaggagaaaggaaaggaccacagagaggggaggggaagtgggagagtcatggttaggacctcaggctgaggccttctgccaagccaggggtctggtgtcactcaactgggaaacactgtcagcacccaaagctgctctcagaggtgggggtgacgggagccactgcatgtgggaggcacacgggccctgtggcatccacagctgtggtctccttagtgtcctgtcacagacttgcaaatcaaagcccagagaggcggcagccagccaccctcccacctccccagcactcctgtgcccaccccatgcctgtttagcctctgcccttgctgcccccttcctctgctgtgtccttttggcaagaggaaggtacctcggggcagatttgggtggtccttgtgagacccagggcagagtgtggtccggggatatggcttctgtccagctccctgccagacagctgtctgatcctaagcacagaccagcctctcgggggttttgttcggccaggaggtgggctgaggggcaagtgtgtggaacatgcaggaacaggctgtgcagtggccctcagtagtggggggctggggacttctgggagactcctttgctcccattcgccatccatcccctttccctgatcagtgggccctggctctggacactgagtggagcagacagtcctcctgcccctataggttccacctcctgactggcactgtggcatcagcatggtccagcccgtgctgtcctgtcaaggaccacctccacagccagtggccccttcctccatctcagagacagagagacgctgggcacaaaagccctgttgaaagttcactttgaagggaagcccatggggtcatggcgacaacacttgttatggaaaggccctggcgcctccagcagctcccttgaggttcaggtgactggagcatccactgggtgccagcagtgctgctgggaggagcagggcacagacaggggccaaagctttctgaggattctccatctatagctggaaaagtcattcctctcactgcctcccctcctcgtagcgagaaccctctgcccacagtggagattgccatccggaacacgggcgatgcggaccagtggtgcccactgctggagactctgacagacgctgagatggagaagaagatccgcgaccaggacaggaacacgaggtacccctggccctgtggtcctgggctctgcccacaggcacctggctttccaggcagaggcagggccattgcctttcccagtctcccatggtctctgagacagagtacctctagtgctgctagaggcaggcaggcttctgggtgataaggccccatccaaacgccagggtatgtttccctgcatggaacaaacataattcctcaggctgagggtctgaccacagcccagatccaggttttggggtccctggagtgatgagcagggcctgagtggcagacaggcgaggctgagagaaggctgggtctgaccctgctgggggcccacatcctgcctctgttcccacccctacacttggctgccctgtagagccttgggaagggcagcgcccaggctgggagctggccccgactcattgccctccccactcctcttccaggcggatgaggcgtcttgccaacacggccccggcctggtaaccagcccatcagcacacggctcccacggagcatctcagaagattgggccgcctctcctccatcttctggcaaggacagaggcgaggggacagcccagcgccatcctgaggatcggggtgggggtggagtgggggcttccaggtggcccttcccggcacacattccatttgttgagccccagtcctgccccccaccccaccctccctacccctccccagtctctggggtcaggaagaaaccttattttaggttgtgttttgtttttgtataggagccccaggcagggctagtaacagtttttaaataaaaggcaacaggtcatgttcaatttcttcaacaggtcatgttcaatttcttcaaagttttaacataaaaataatgagagccaggagtggggccggggcctggggggacgaaggtggtatgtgaacaaggttggcacacaggcctcaccctcctctgcctcagattcccaagtgggcaggtgggggtgaatggggctccgggtagcacctcagctcctctcagctcccctcagcctgttctccttccagacccagagagctgagaagagtagctgtgaggctcagggcaagaggctctctgcctttcaggaacagccctaaccctgctccccttgcttggcctcaggaaggtgccgcgagctctcctgccgtccctgggccgccctggctctgctgtgtccagatggtcaggctactgccagctggggccttgctgctctgaagtcccctgcggagggcccagtcctgtgtgggcactgctgggctgtcgccagcctgggtgcaggagggctgttctagctccagtggcacccatagccaggtcagctggggccctttcccaccccagcaggtgctgtggcctgggccagctcctgccttacaagccagctgtgaggaatatgggaatagccctcccggcctggtgccagctcttggagttgacacggtacagggaggagacacagcccagggtcccttcccagccctgcctccaaggagttcatgtcccctctgttctcatctgtaatagggaggtgtccccattcttcagaatggacacaggatctgggagggcagcaaactggctcgcagctccagccttactgaagagaatgggcacagatccgggcacagatcccagcacagactgctgccaccctcagctgttggcaggtcccatgctgccagggcagggctagggtcagaggctgctgtgctccctggaagtggggtagggccccatgtggggcagaggcagagctctgattagggattggggttcttggtcgctgagatgtgagaggagggctcctttgagcacatgttagcatgggactcttcccagggagtttgcactcagggcctctgccctccatcaaagagtggaactccccagagccccatgcacagcaaggggacagctgggccttactggaaggccttgaacaaaggggaagattcccagcccagctgctcttagacatgaacaggtttcattgctgaggtgtttgttctgtccatgaggtaggaacctcggcaatgaaagggtgaggcagccctgtgtctccacaactggggggatggaaggaaccttggctgcctcaccccacaggtcgggcagggccacctggctgggaggtgccgggaaggctgggccctcactcctgaccgccagctcacaccgccgcaaagccatctccacaaggtctggctacaacacggagggcagactcaacagagaacagtgttgttaccatgaaaatgacaacctgtctttggaggaggccccgtgccactgagcatccagaaataaaccacaacatggacaggcttagaacaacaaggaaagctgccaggtcagaagagaaaaatgagccacaggggtcagataaggctcacacacgtcctcagctaaaaagggcaggaacagaaccttccagaagtccctgcctcacccagtctcagaactctgctaaggtgaaaacttaggctctgaggtcatagaaagggcagaagacctagtcctggccctcttctgcacctgaatccatggggctttggcatcaccagatgaaaaatgaggcatacgcccacctgtcagggtggctgatgagagacaggagaggctagattggcatcagcctgaaggcaccactggcaggaacatctgtaggctggtttggcacaacctaggagacgcctgtcctggccccagcagccgaaatctggtgaactt

SEQ ID NO: 18 - DNA, 8972 bp, Homo sapiens
gtccaagggtagccaaggatggctgcagcttcatatgatcagttgttaaagcaagttgaggcactgaagatggagaactcaaatcttcgacaagagctagaagataattccaatcatcttacaaaactggaaactgaggcatctaatatgaaggaagtacttaaacaactacaaggaagtattgaagatgaagctatggcttcttctggacagattgatttattagagcgtcttaaagagcttaacttagatagcagtaatttccctggagtaaaactgcggtcaaaaatgtccctccgttcttatggaagccgggaaggatctgtatcaagccgttctggagagtgcagtcctgttcctatgggttcatttccaagaagagggtttgtaaatggaagcagagaaagtactggatatttagaagaacttgagaaagagaggtcattgcttcttgctgatcttgacaaagaagaaaaggaaaaagactggtattacgctcaacttcagaatctcactaaaagaatagatagtcttcctttaactgaaaatttttccttacaaacagatatgaccagaaggcaattggaatatgaagcaaggcaaatcagagttgcgatggaagaacaactaggtacctgccaggatatggaaaaacgagcacagcgaagaatagccagaattcagcaaatcgaaaaggacatacttcgtatacgacagcttttacagtcccaagcaacagaagcagagaggtcatctcagaacaagcatgaaaccggctcacatgatgctgagcggcagaatgaaggtcaaggagtgggagaaatcaacatggcaacttctggtaatggtcagggttcaactacacgaatggaccatgaaacagccagtgttttgagttctagtagcacacactctgcacctcgaaggctgacaagtcatctgggaaccaaggtggaaatggtgtattcattgttgtcaatgcttggtactcatgataaggatgatatgtcgcgaactttgctagctatgtctagctcccaagacagctgtatatccatgcgacagtctggatgtcttcctctcctcatccagcttttacatggcaatgacaaagactctgtattgttgggaaattcccggggcagtaaagaggctcgggccagggccagtgcagcactccacaacatcattcactcacagcctgatgacaagagaggcaggcgtgaaatccgagtccttcatcttttggaacagatacgcgcttactgtgaaacctgttgggagtggcaggaagctcatgaaccaggcatggaccaggacaaaaatccaatgccagctcctgttgaacatcagatctgtcctgctgtgtgtgttctaatgaaactttcatttgatgaagagcatagacatgcaatgaatgaactagggggactacaggccattgcagaattattgcaagtggactgtgaaatgtacgggcttactaatgaccactacagtattacactaagacgatatgctggaatggctttgacaaacttgacttttggagatgtagccaacaaggctacgctatgctctatgaaaggctgcatgagagcacttgtggcccaactaaaatctgaaagtgaagacttacagcaggttattgcaagtgttttgaggaatttgtcttggcgagcagatgtaaatagtaaaaagacgttgcgagaagttggaagtgtgaaagcattgatggaatgtgctttagaagttaaaaaggaatcaaccctcaaaagcgtattgagtgccttatggaatttgtcagcacattgcactgagaataaagctgatatatgtgctgtagatggtgcacttgcatttttggttggcactcttacttaccggagccagacaaacactttagccattattgaaagtggaggtgggatattacggaatgtgtccagcttgatagctacaaatgaggaccacaggcaaatcctaagagagaacaactgtctacaaactttattacaacacttaaaatctcatagtttgacaatagtcagtaatgcatgtggaactttgtggaatctctcagcaagaaatcctaaagaccaggaagcattatgggacatgggggcagttagcatgctcaagaacctcattcattcaaagcacaaaatgattgctatgggaagtgctgcagctttaaggaatctcatggcaaataggcctgcgaagtacaaggatgccaatattatgtctcctggctcaagcttgccatctcttcatgttaggaaacaaaaagccctagaagcagaattagatgctcagcacttatcagaaacttttgacaatatagacaatttaagtcccaaggcatctcatcgtagtaagcagagacacaagcaaagtctctatggtgattatgtttttgacaccaatcgacatgatgataataggtcagacaattttaatactggcaacatgactgtcctttcaccatatttgaatactacagtgttacccagctcctcttcatcaagaggaagcttagatagttctcgttctgaaaaagatagaagtttggagagagaacgcggaattggtctaggcaactaccatccagcaacagaaaatccaggaacttcttcaaagcgaggtttgcagatctccaccactgcagcccagattgccaaagtcatggaagaagtgtcagccattcatacctctcaggaagacagaagttctgggtctaccactgaattacattgtgtgacagatgagagaaatgcacttagaagaagctctgctgcccatacacattcaaacacttacaatttcactaagtcggaaaattcaaataggacatgttctatgccttatgccaaattagaatacaagagatcttcaaatgatagtttaaatagtgtcagtagtagtgatggttatggtaaaagaggtcaaatgaaaccctcgattgaatcctattctgaagatgatgaaagtaagttttgcagttatggtcaatacccagccgacctagcccataaaatacatagtgcaaatcatatggatgataatgatggagaactagatacaccaataaattatagtcttaaatattcagatgagcagttgaactctggaaggcaaagtccttcacagaatgaaagatgggcaagacccaaacacataatagaagatgaaataaaacaaagtgagcaaagacaatcaaggaatcaaagtacaacttatcctgtttatactgagagcactgatgataaacacctcaagttccaaccacattttggacagcaggaatgtgtttctccatacaggtcacggggagccaatggttcagaaacaaatcgagtgggttctaatcatggaattaatcaaaatgtaagccagtctttgtgtcaagaagatgactatgaagatgataagcctaccaattatagtgaacgttactctgaagaagaacagcatgaagaagaagagagaccaacaaattatagcataaaatataatgaagagaaacgtcatgtggatcagcctattgattatagtttaaaatatgccacagatattccttcatcacagaaacagtcattttcattctcaaagagttcatctggacaaagcagtaaaaccgaacatatgtcttcaagcagtgagaatacgtccacaccttcatctaatgccaagaggcagaatcagctccatccaagttctgcacagagtagaagtggtcagcctcaaaaggctgccacttgcaaagtttcttctattaaccaagaaacaatacagacttattgtgtagaagatactccaatatgtttttcaagatgtagttcattatcatctttgtcatcagctgaagatgaaataggatgtaatcagacgacacaggaagcagattctgctaataccctgcaaatagcagaaataaaagaaaagattggaactaggtcagctgaagatcctgtgagcgaagttccagcagtgtcacagcaccctagaaccaaatccagcagactgcagggttctagtttatcttcagaatcagccaggcacaaagctgttgaattttcttcaggagcgaaatctccctccaaaagtggtgctcagacacccaaaagtccacctgaacactatgttcaggagaccccactcatgtttagcagatgtacttctgtcagttcacttgatagttttgagagtcgttcgattgccagctccgttcagagtgaaccatgcagtggaatggtaagtggcattataagccccagtgatcttccagatagccctggacaaaccatgccaccaagcagaagtaaaacacctccaccacctcctcaaacagctcaaaccaagcgagaagtacctaaaaataaagcacctactgctgaaaagagagagagtggacctaagcaagctgcagtaaatgctgcagttcagagggtccaggttcttccagatgctgatactttattacattttgccacggaaagtactccagatggattttcttgttcatccagcctgagtgctctgagcctcgatgagccatttatacagaaagatgtggaattaagaataatgcctccagttcaggaaaatgacaatgggaatgaaacagaatcagagcagcctaaagaatcaaatgaaaaccaagagaaagaggcagaaaaaactattgattctgaaaaggacctattagatgattcagatgatgatgatattgaaatactagaagaatgtattatttctgccatgccaacaaagtcatcacgtaaagcaaaaaagccagcccagactgcttcaaaattacctccacctgtggcaaggaaaccaagtcagctgcctgtgtacaaacttctaccatcacaaaacaggttgcaaccccaaaagcatgttagttttacaccgggggatgatatgccacgggtgtattgtgttgaagggacacctataaacttttccacagctacatctctaagtgatctaacaatcgaatcccctccaaatgagttagctgctggagaaggagttagaggaggagcacagtcaggtgaatttgaaaaacgagataccattcctacagaaggcagaagtacagatgaggctcaaggaggaaaaacctcatctgtaaccatacctgaattggatgacaataaagcagaggaaggtgatattcttgcagaatgcattaattctgctatgcccaaagggaaaagtcacaagcctttccgtgtgaaaaagataatggaccaggtccagcaagcatctgcgtcgtcttctgcacccaacaaaaatcagttagatggtaagaaaaagaaaccaacttcaccagtaaaacctataccacaaaatactgaatataggacacgtgtaagaaaaaatgcagactcaaaaaataatttaaatgctgagagagttttctcagacaacaaagattcaaagaaacagaatttgaaaaataattccaaggacttcaatgataagctcccaaataatgaagatagagtcagaggaagttttgcttttgattcacctcatcattacacgcctattgaaggaactccttactgtttttcacgaaatgattctttgagttctctagattttgatgatgatgatgttgacctttccagggaaaaggctgaattaagaaaggcaaaagaaaataaggaatcagaggctaaagttaccagccacacagaactaacctccaaccaacaatcagctaataagacacaagctattgcaaagcagccaataaatcgaggtcagcctaaacccatacttcagaaacaatccacttttccccagtcatccaaagacataccagacagaggggcagcaactgatgaaaagttacagaattttgctattgaaaatactccagtttgcttttctcataattcctctctgagttctctcagtgacattgaccaagaaaacaacaataaagaaaatgaacctatcaaagagactgagccccctgactcacagggagaaccaagtaaacctcaagcatcaggctatgctcctaaatcatttcatgttgaagataccccagtttgtttctcaagaaacagttctctcagttctcttagtattgactctgaagatgacctgttgcaggaatgtataagctccgcaatgccaaaaaagaaaaagccttcaagactcaagggtgataatgaaaaacatagtcccagaaatatgggtggcatattaggtgaagatctgacacttgatttgaaagatatacagagaccagattcagaacatggtctatcccctgattcagaaaattttgattggaaagctattcaggaaggtgcaaattccatagtaagtagtttacatcaagctgctgctgctgcatgtttatctagacaagcttcgtctgattcagattccatcctttccctgaaatcaggaatctctctgggatcaccatttcatcttacacctgatcaagaagaaaaaccctttacaagtaataaaggcccacgaattctaaaaccaggggagaaaagtacattggaaactaaaaagatagaatctgaaagtaaaggaatcaaaggaggaaaaaaagtttataaaagtttgattactggaaaagttcgatctaattcagaaatttcaggccaaatgaaacagccccttcaagcaaacatgccttcaatctctcgaggcaggacaatgattcatattccaggagttcgaaatagctcctcaagtacaagtcctgtttctaaaaaaggcccaccccttaagactccagcctccaaaagccctagtgaaggtcaaacagccaccacttctcctagaggagccaagccatctgtgaaatcagaattaagccctgttgccaggcagacatcccaaataggtgggtcaagtaaagcaccttctagatcaggatctagagattcgaccccttcaagacctgcccagcaaccattaagtagacctatacagtctcctggccgaaactcaatttcccctggtagaaatggaataagtcctcctaacaaattatctcaacttccaaggacatcatcccctagtactgcttcaactaagtcctcaggttctggaaaaatgtcatatacatctccaggtagacagatgagccaacagaaccttaccaaacaaacaggtttatccaagaatgccagtagtattccaagaagtgagtctgcctccaaaggactaaatcagatgaataatggtaatggagccaataaaaaggtagaactttctagaatgtcttcaactaaatcaagtggaagtgaatctgatagatcagaaagacctgtattagtacgccagtcaactttcatcaaagaagctccaagcccaaccttaagaagaaaattggaggaatctgcttcatttgaatctctttctccatcatctagaccagcttctcccactaggtcccaggcacaaactccagttttaagtccttcccttcctgatatgtctctatccacacattcgtctgttcaggctggtggatggcgaaaactcccacctaatctcagtcccactatagagtataatgatggaagaccagcaaagcgccatgatattgcacggtctcattctgaaagtccttctagacttccaatcaataggtcaggaacctggaaacgtgagcacagcaaacattcatcatcccttcctcgagtaagcacttggagaagaactggaagttcatcttcaattctttctgcttcatcagaatccagtgaaaaagcaaaaagtgaggatgaaaaacatgtgaactctatttcaggaaccaaacaaagtaaagaaaaccaagtatccgcaaaaggaacatggagaaaaataaaagaaaatgaattttctcccacaaatagtacttctcagaccgtttcctcaggtgctacaaatggtgctgaatcaaagactctaatttatcaaatggcacctgctgtttctaaaacagaggatgtttgggtgagaattgaggactgtcccattaacaatcctagatctggaagatctcccacaggtaatactcccccggtgattgacagtgtttcagaaaaggcaaatccaaacattaaagattcaaaagataatcaggcaaaacaaaatgtgggtaatggcagtgttcccatgcgtaccgtgggtttggaaaatcgcctgaactcctttattcaggtggatgcccctgaccaaaaaggaactgagataaaaccaggacaaaataatcctgtccctgtatcagagactaatgaaagttctatagtggaacgtaccccattcagttctagcagctcaagcaaacacagttcacctagtgggactgttgctgccagagtgactccttttaattacaacccaagccctaggaaaagcagcgcagatagcacttcagctcggccatctcagatcccaactccagtgaataacaacacaaagaagcgagattccaaaactgacagcacagaatccagtggaacccaaagtcctaagcgccattctgggtcttaccttgtgacatctgtttaaaagagaggaagaatgaaactaagaaaattctatgttaattacaactgctatatagacattttgtttcaaatgaaactttaaaagactgaaaaattttgtaaataggtttgattcttgttagagggtttttgttctggaagccatatttgatagtatactttgtcttcactggtcttattttgggaggcactcttgatggttaggaaaaaaatagtaaagccaagtatgtttgtacagtatgttttacatgtatttaaagtagcacccatcccaacttcctttaattattgcttgtcttaaaataatgaacactacagatagaaaatatgatatattgctgttatcaatcatttctagattataaactgactaaacttacatcagggaaaaattggtatttatgcaaaaaaaaatgtttttgt

SEQ ID NO: 19 - DNA, 3927 bp, Homo sapiens
taccgcgccggagccttccgcagctgccgcttcagtccgaaggaggaagggaaccaacccactttctcggcgccgcggctcttttctaaaagtaatgtgaaaacctttgcatcttctgatagtctagccaaggtccaagaagtagcaagctggcttttggaaatgaatcaggaactgctctctgtgggcagcaaaagacgacgaactggaggctctctgagaggtaacccttcctcaagccaggtagatgaagaacagatgaatcgtgtggtagaggaggaacagcaacagcaactcagacaacaagaggaggagcacactgcaaggaatggtgaagttgttggagtagaacctagacctggaggccaaaatgattcccagcaaggacagttggaagaaaacaataatagatttatttcggtagatgaggactcctcaggaaaccaagaagaacaagaggaagatgaagaacatgctggtgaacaagatgaggaggatgaggaggaggaggagatggaccaggagagtgacgattttgatcagtctgatgatagtagcagagaagatgaacatacacatactaacagtgtcacgaactccagtagtattgtggacctgcccgttcaccaactctcctccccattctatacaaaaacaacaaaaatgaaaagaaagttggaccatggttctgaggtccgctctttttctttgggaaagaaaccatgcaaagtctcagaatatacaagtaccactgggcttgtaccatgttcagcaacaccaacaacttttggggacctcagagcagccaatggccaagggcaacaacgacgccgaattacatctgtccagccacctacaggcctccaggaatggctaaaaatgtttcagagctggagtggaccagagaaattgcttgctttagatgaactcattgatagttgtgaaccaacacaagtaaaacatatgatgcaagtgatagaaccccagtttcaacgagacttcatttcattgctccctaaagagttggcactctatgtgctttcattcctggaacccaaagacctgctacaagcagctcagacatgtcgctactggagaattttggctgaagacaaccttctctggagagagaaatgcaaagaagaggggattgatgaaccattgcacatcaagagaagaaaagtaataaaaccaggtttcatacacagtccatggaaaagtgcatacatcagacagcacagaattgatactaactggaggcgaggagaactcaaatctcctaaggtgctgaaaggacatgatgatcatgtgatcacatgcttacagttttgtggtaaccgaatagttagtggttctgatgacaacactttaaaagtttggtcagcagtcacaggcaaatgtctgagaacattagtgggacatacaggtggagtatggtcatcacaaatgagagacaacatcatcattagtggatctacagatcggacactcaaagtgtggaatgcagagactggagaatgtatacacaccttatatgggcatacttccactgtgcgttgtatgcatcttcatgaaaaaagagttgttagcggttctcgagatgccactcttagggtttgggatattgagacaggccagtgtttacatgttttgatgggtcatgttgcagcagtccgctgtgttcaatatgatggcaggagggttgttagtggagcatatgattttatggtaaaggtgtgggatccagagactgaaacctgtctacacacgttgcaggggcatactaatagagtctattcattacagtttgatggtatccatgtggtgagtggatctcttgatacatcaatccgtgtttgggatgtggagacagggaattgcattcacacgttaacagggcaccagtcgttaacaagtggaatggaactcaaagacaatattcttgtctctgggaatgcagattctacagttaaaatctgggatatcaaaacaggacagtgtttacaaacattgcaaggtcccaacaagcatcagagtgctgtgacctgtttacagttcaacaagaactttgtaattaccagctcagatgatggaactgtaaaactatgggacttgaaaacgggtgaatttattcgaaacctagtcacattggagagtggggggagtgggggagttgtgtggcggatcagagcctcaaacacaaagctggtgtgtgcagttgggagtcggaatgggactgaagaaaccaagctgctggtgctggactttgatgtggacatgaagtgaagagcagaaaagatgaatttgtccaattgtgtagacgatatactccctgcccttccccctgcaaaaagaaaaaaagaaaagaaaaagaaaaaaatcccttgttctcagtggtgcaggatgttggcttggggcaacagattgaaaagacctacagactaagaaggaaaagaagaagagatgacaaaccataactgacaagagaggcgtctgctgtctcatcacataaaaggcttcacttttgactgagggcagctttgcaaaatgagactttctaaatcaaaccaggtgcaattatttctttattttcttctccagtggtcattgggcagtgttaatgctgaaacatcattacagattctgctagcctgttcttttaccactgacagctagacacctagaaaggaactgcaataatatcaaaacaagtactggttgactttctaattagagagcatctgcaacaaaaagtcatttttctggagtggaaaagcttaaaaaaattactgtgaattgtttttgtacagttatcatgaaaagcttttttttttttttttttgccaaccattgccaatgtcaatcaatcacagtattagcctctgttaatctatttactgttgcttccatatacattcttcaatgcatatgttgctcaaaggtggcaagttgtcctgggttctgtgagtcctgagatggatttaattcttgatgctggtgctagaagtaggtcttcaaatatgggattgttgtcccaaccctgtactgtactcccagtggccaaacttatttatgctgctaaatgaaagaaagaaaaaagcaaattatttttttttattttttttctgctgtgacgttttagtcccagactgaattccaaatttgctctagtttggttatggaaaaaagactttttgccactgaaacttgagccatctgtgcctctaagaggctgagaatggaagagtttcagataataaagagtgaagtttgcctgcaagtaaagaattgagagtgtgtgcaaagcttattttcttttatctgggcaaaaattaaaacacattccttggaacagagctattacttgcctgttctgtggagaaacttttctttttgagggctgtggtgaatggatgaacgtacatcgtaaaactgacaaaatattttaaaaatatataaaacacaaaattaaaataaagttgctggtcagtcttagtgttttacagtatttgggaaaacaactgttacagttttattgctctgagtaactgacaaagcagaaactattcagtttttgtagtaaaggcgtcacatgcaaacaaacaaaatgaatgaaacagtcaaatggtttgcctcattctccaagagccacaactcaagctgaactgtgaaagtggtttaacactgtatcctaggcgatcttttttcctccttctgtttatttttttgtttgttttatttatagtctgatttaaaacaatcagattcaagttggttaattttagttatgtaacaacctgacatgatggaggaaaacaacctttaaagggattgtgtctatggtttgattcacttagaaattttattttcttataacttaagtgcaataaaatgtgttttttcatgttaaaaaaaaaaaaaaaaaaa

SEQ ID NO: 20 - DNA, 2402 bp, Homo sapiens
gggctgaggaggcggggcctgggaggggacaaagccgggaagaggaaaagctcggacctaccctgtggtcccgggtttctgcagagtctacttcagaagcggaggcactgggagtccggtttgggattgccaggctgtggttgtgagtctgagcttgtgagcggctgtggcgccccaactcttcgccagcatatcatcccggcaggcgataaactacattcagttgagtctgcaagactgggaggaactggggtgataagaaatctattcactgtcaaggtttattgaagtcaaaatgtccaaaaaaatcagtggcggttctgtggtagagatgcaaggagatgaaatgacacgaatcatttgggaattgattaaagagaaactcatttttccctacgtggaattggatctacatagctatgatttaggcatagagaatcgtgatgccaccaacgaccaagtcaccaaggatgctgcagaagctataaagaagcataatgttggcgtcaaatgtgccactatcactcctgatgagaagagggttgaggagttcaagttgaaacaaatgtggaaatcaccaaatggcaccatacgaaatattctgggtggcacggtcttcagagaagccattatctgcaaaaatatcccccggcttgtgagtggatgggtaaaacctatcatcataggtcgtcatgcttatggggatcaatacagagcaactgattttgttgttcctgggcctggaaaagtagagataacctacacaccaagtgacggaacccaaaaggtgacatacctggtacataactttgaagaaggtggtggtgttgccatggggatgtataatcaagataagtcaattgaagattttgcacacagttccttccaaatggctctgtctaagggttggcctttgtatctgagcaccaaaaacactattctgaagaaatatgatgggcgttttaaagacatctttcaggagatatatgacaagcagtacaagtcccagtttgaagctcaaaagatctggtatgagcataggctcatcgacgacatggtggcccaagctatgaaatcagagggaggcttcatctgggcctgtaaaaactatgatggtgacgtgcagtcggactctgtggcccaagggtatggctctctcggcatgatgaccagcgtgctggtttgtccagatggcaagacagtagaagcagaggctgcccacgggactgtaacccgtcactaccgcatgtaccagaaaggacaggagacgtccaccaatcccattgcttccatttttgcctggaccagagggttagcccacagagcaaagcttgataacaataaagagcttgccttctttgcaaatgctttggaagaagtctctattgagacaattgaggctggcttcatgaccaaggacttggctgcttgcattaaaggtttacccaatgtgcaacgttctgactacttgaatacatttgagttcatggataaacttggagaaaacttgaagatcaaactagctcaggccaaactttaagttcatacctgagctaagaaggataattgtcttttggtaactaggtctacaggtttacatttttctgtgttacactcaaggataaaggcaaaatcaattttgtaatttgtttagaagccagagtttatcttttctataagtttacagcctttttcttatatatacagttattgccacctttgtgaacatggcaagggacttttttacaatttttattttattttctagtaccagcctaggaattcggttagtactcatttgtattcactgtcactttttctcatgttctaattataaatgaccaaaatcaagattgctcaaaagggtaaatgatagccacagtattgctccctaaaatatgcataaagtagaaattcactgccttcccctcctgtccatgaccttgggcacagggaagttctggtgtcatagatatcccgttttgtgaggtagagctgtgcattaaacttgcacatgactggaacgaagtatgagtgcaactcaaatgtgttgaagatactgcagtcatttttgtaaagaccttgctgaatgtttccaatagactaaatactgtttaggccgcaggagagtttggaatccggaataaatactacctggaggtttgtcctctccatttttctctttctcctcctggcctggcctgaatattatactactctaaatagcatatttcatccaagtgcaataatgtaagctgaatcttttttggacttctgctggcctgttttatttcttttatataaatgtgatttctcagaaattgatattaaacactatcttatcttctcctgaactgttgattttaattaaaattaagtgctaattaccattaaaaaaaaaa

SEQ ID NO: 21 - DNA, 184490 bp, Homo sapiens
gatcatttgaggtcaggagttccagaccagcctgctcaacatggtgaaaccccgtctctactaaaaatacaaaaattagccaggtgtggtggtgcatgcctgtaatgccaactactcaggaggcagaggcaggagaattgcttgaatccgggaggtggaggttgcagtgagctgagatagggccactgcactctagcctgggcaacagagagagactccgtctcaaaagaaaaaaaaaaaaagcatccagattggaaaggaaaaaatcaagattacccctatttgcagatgacatgtcttataaagaaaatcctaaggaagccataaaaaacaacaacaacaacaacaaaaaaactattagaggccaggcaccacggctcatacctataatcccagcactctgggaggccaaggcaggcagattgcctgaggtcaggagttcgagaccagtctggccaacatggtgaaaccccgtctctactaaaaatacaaaaaaatgagccaggcatggtggtgtccaccttaatcccagctgctagggaggctgaggcaggggaatcacttgaaccagggaggtggaggttgcaatgagccgagatggtgccattgcactccagcctgggcaacagagcaagactctgtctcaaaaaaaaaaaaaaaaaaaaaaaaaaggagttaagaaacctccctgggcggggcatggtggctcatgcctataatccagcactttgggaggccaaggccagcaaatcacctgaggtcgggagttcgagaccagcctgaccaacatggagaaaccctggtgctactaaaaatacaaagttagctgggcaaggtgatgcatgcctgtaatcccagctattccagaggctgaggcaggagaatcgcttgaacccgggaggcagaggttgtggtgagccaagattgcgccattgcactccagcctgggcaacaagagcgaaactctgtcccaaaaacaaaacgaaacaaaacaaaaactattagagctaataaatgacttcgacaaggttgcaggatacacagtgaatatataaaagtcaataaatctcaatgaactaccaaaaattaagaatgcaatgctagttacaatagcatcaaaagaaataaaatacttaggaataagtttaacaaaagtaaaggacttgcatactaaaaactggaaaacgtcactggaggaaattaaagacctaaatccacgcaaagacatactgtgttcatggactgaaaggttcaatattgttaaaaactcaatactcccaaaattcaccgatacattcaacacaattcctatcataatctcaactgccttttgtgcagaaattgacaaacatcctaaaactcctaaggtaatacaagggggctggaatagccaaaataatcttgaaaatgaagaaaaagttgaagcacttacacttaccaatttcaaaacttactgtaaagctacagtaatccagacgatgtactggcatgaggttagacacagaaattagtggaacaaaataaaaaatccagacctttcttatttatctagtcaactctgaagcatggaatccagacatttatggtcagtttattttttttcagagacagagtcttgctctgtcacccaggctgaagtagagtggctcaatcatagctcactataaccttgaactcctgggctgaagtgatcctcccacttcagccaacccagtagctaggactagaggcatgtaccaccaaataaatgcccagctaattacttacttattggtacagatggggtgtctcagtatgctgcccaggctggtctcgctcccctggcttcaagcaatcctcctgccttggcctcccaaagtgttgggattacagggtgagccattacagctggcctgcatttttcataacagtgtccattaatgaatggacaaacaaaatatggcatattcatataatgaaatattcagctataaaaaggaatgaagtactaatacctgctacaacatggaataaggctgaaaacattatgctatgtgaaagtcagacacaaaaagcgaaatattctatttcatttatgtgcaatgtccaggcaaggcacatgtatagatacagaaagtagatttgtggttggcagaggacggggcaagggggaattggaagtgacttaatagtataaggattctctttggagtgatggaaatattgaaattactggtgatatctgcacattatgaatccataaatatcctggattttcataccctgaaaaacaacgaagtttacattttgtagtatgtgcatcatatctcaataaaaaaatatgattccaattttttttttttttttttgagatggagtcccgctcttgtcacctgtgctggagtgcaatgatgcaatctcggctcactgcaacctctgcctcccaggttcaagcgattctcctgcctcagcctcccaagtagctgggattacagacgcctgccaccatgcctggctaatttttatatttttagtagagatggggttttgccatgttggccaggctggtctggaactcctgacctcaggtgatttgcccgcctcggcctcccaaagtgctgggattacacgcgtgagccactgcacccggcctatgatttcaaatttttaatgtgtcgtatgaggttctacttgctttgtaccctaatttcctcttcagcctatgttttaccattccatcgcttccagccaaactggtctttcagtcccacagatacacattgattatatttcaaggccattgtttattctatttcctttgcttgggcagctaatcttttcttaacctagctatcttcaactcattcttcacagtttagtataattactccctattccctactattaaatattcccttataggtattacttaatacttataagtattcccttatattttcctttgaagtacacttatctcagtgctggcataatagtcagtaagtatttgttagctactgaaattataagtgggagctaaaggatgagaacacacgggcacataaagggaacaacacacactggggcctattggaggtgaagggtgggaggaggtagaggatcaggaaaaataactaatgggttctaggcttaacacctgggtgatgaaataatacgtacaacaaacccctatgacacaagtttacctatataacaaacctgcacatgtacccctgaatttaaaagataaaaaaaagaaattatgtctaacgtctcttccaactttataacgttctactctcttcacctggaactgtatcgttaaccaggtccaacaggtgaaaaacctaataaggttgcctacaaagtcattatacactaaggttttaaaaaggaaagggcaaggatatggtcatctcgttacaggcaatgccctagctgtgatttgggaatcaactcaccactctctacttgttgatgaatctgttttccaacctcttgctaactaataagaagaaacaaacaaatatacaaatcaaaaaccaaaggcattgtgttttggagaaagcatttggatatctgaagaaagctttatctcagataacatgacttcaatcttcctatcattgaacatcaaaccacagatgtgaaattaattagatcaaagatacactgcaatgttttcttctctttttgtgaaaactagctggctgaaaagtaatttttatgatggctggctttccgaccgttataatatttggaataggtgagttagctgttactagctttttgtaaacacaaaaatttaaaacttctacagactattagaatcaccttaaaattaggacagttggagctttttcctcatatgcttcaagatttagattgaacacctcaaatatacttccttttcatggtggagtttcaagtacttatcaccctagatgccttcagtcacttggggacttctgatagacggtggtattaaaatctactatagatttgcagtagatttttatctatcttaaagtagatttgctttcccctagaccatgcattctcaaaaggagtcatactgccctaagaggctgaaaattggttctggggcagggaggaatgaagaaaatctccctctttttatgcataaatcacagatacacatgatatataaacatatacaatatattcatgacactaaaacattaaactttcgtgtggggaggagaggagggtcagggaaaaaaaaaaagcctaagaagattccttaaagttgtgtaatgaaataaaggttgagaaacaatgccccagacagaatacagtgatacacagtaaacctttttcagaaaaatattgtcatttgtgctagcataacctggaaaggaatcattacagataattcatggcatttcataaaacattatacctctgtatagcacacacatgagatggggctgttaaaagctagattacctctataataagtgtttaagttataatgtatctcaaaatagtaatatctaggatacattatcttctgctcttaacaacatgccccaactttggcaatcttgagttctcattttagattagatttgatgtattctggtttacttttgtcccaaaagttccaaaataatgtagtaaatagttgactactctcatgttcactgatcattatatagcaagtcctcgaataccatcattttgttcaatgtttttgttatactgctgatgagagaaaaaaatcaatttctggctgaggacactgtatgtgtggagtttacacattttccccatgcctgcatgggttttctccaggtacacgtttcttcccaaactccaaatatgtgcacgttgttaactggtgtgtctaaattattacagtgtgagcatgagtgagtgtacgtgggcgtgtgagtgctcccttcaacagaatgacatcctgcccagggttagttcctgccttgcaccctaagctgctgggataggctctagctacctgcaaccttgaactggactaactgggtaagtaattatcttgtttttattaatccatcttaaatgtatatatagcttacatgtatttcaatgtttaatattagaagtgttttggactttatttacaagtgtggtgatatttttgtgaccaaaaatatgctgaagaaattcttgtatatatcagttagcctatggtaaaattagtttgattatatatcattttgcttaaagttgcagttttcaagaacctattgaacctattaaattaggccttactatatatatatgattagtatctgcctacaaaatgtttatttatcatcattaagtatctgactataaccaattctcagtcaggtaacaggaaattttaggcacaaattaattctaaatctctggtgttagatgaatgaaaatccaaatatgatgaaaatactggctgggcacagtggctcatggctataatcccagcactttgggaggccgaggcgcgtggatcacttgaggtcaggagttccagaacagcctggccaatatggtgaaacccagtctctactaaaaatacaaaaattagccgggcgtggtggtgagcgcctgtaatcccagctacttcagaggctgaggcaggagaatcacttgaacctgggaggcagaggttgcagtaagccaagatctcactgctgcacccagcctggatgacaagagtgcaattctgtctcaagaaataaataaataaaatagaaaatacaaactaggcactaatcatctcttatcagtataatacaaatcgttattctacaactaatattagttattactgttttttccttttattcctaaaaacaacttaagaataaaagaagtgtatttttttgtgtaaacttactgacaaaggtccctgaataggtaagaaagtatgcctgagtttccttcttaacataatattatcttcagcctacttttattataagtggaggtggtaatgagtaactaaatgaattgaaggggaaacaaccgaaaaagagaagaaaggataagatcctaactatatgaagggtattttttcttcctacttgtagagagggaaagataaaaagagaggtttaaagcaagcaagagatagtaaagcacgctatgtgaaaacatctccttcacatattttattatttcctagaaagattagtaatttaatgttctttaagcatgcaaataattcttaggaagccgtaccttatgttgtcttatattactagatccacaaataacagggacaaggtttctgtctataaagttacaatttacttggagatagaagatatatacacaaataactgtaatgcaaagcaaaaatggtaagaaaatagagctgactcacttcatgggaagggaggggctggagaaaccactactaagcttggaaattatgtgatgtttgaaggtgcagatgagtactgaaggatggttgggaatcccaaagaagctgacagaaagtatatatgcaatcatatttggggaacatgtccagtttggatgcagcacaaggtttatgaagggtaacagttggagatacaacagaaaagacaaaatgggtaaggatcatgaaaagttttagacagcaatgagtacatatattattaaataaacaaaggagtgtcataatcagagccatacttttgcaaatgttttattaaatatctatgttttggtgatataaaggtgaatagaaccagcagctcttgacctgttaggggtgtgtcagttttggtcctgtttgacctcaaacacgttcttgacccttctgtcgctctctactgtatgacataaagcttgactctatataggcaatgttccccaagctcttctgtcggcctgctactggctgggctcagtaaataggaagcactggtgggaggctggagggcaggaggaagcagccatatttttcccccattccctttctgcctcagtagagtctcctctaagactaccactccctcatcagacaagtcttccacgttccgcagtcaaaccagcctcttgattgcttcctctctccttatccttctcattagcatagtggcttcctactgttgctaaccactgagatgccttagttgtaagctgctgggcgtcttagcttttctctcaccagtgtaaacgaattctctcattaaatctttccatgttaaatactcagaatggtttctactttttttactgcatgctgtctcatacagaaggtaacaaatctattcaagaaaaccttcacagatgatagttttggggactcccagaactcttgaagcttgtccattcatccatgactaagactactaataaaacaaaaaaccaagtaagtttcaaattgggaagatgaaaaagttccagaaactgatggtagtgatggttgcagaaaaatgtcaatatagttaacactactgatctgtacattaaaaacaaacaacaacaacaacaacaacaacaaactcattgttttgggctttaagaactatacatttttaagtgttgaattttgttagtatattttatcaaaaaaaagtaaacacacatctacaatgagacatgataaggttgtaacagaagtacaatgctatggcaacatttaagaagtactgactgtacttgctgaatgaagtttcagagatcaggcatgacctgaaccttgaatagaagtgtactaggaagccaaagagaagtagaatacatacaagaattttcaaagaaacttcaattcgtttggcatgtctgcagcataaaacagatgttaggaagttgagatcaagttggagaggtaggtaggatcagttccacagagcaccttgaataaatagataaaaactgaactgatggcccagaggcaacaaacactttgatgtattctggcccacacaacattttgtaaaatcccagcaaggcaataagggctacttaagtggagtagtgagatgcaaaagtcagagtgcagtatcctgaaggataaaaggtaggtgaagaacagcaactaagtggaattcattgttctttgaataaatttgacttgtgaaagggtgacacagaacataagacagaatgttctgtttaatgggtgtctaatgtctagtggggtccagaaaagtgtttttttgtgtgtatgtttaagaatttaaaaaaaacctaattatctgaacactaaggggagaaaacttaacttctctatgttcagcaattggcacagtgtttggaacatactaggcacccaaagatttgctagaaaaaaaacattatgaagggaccaataacaagaggagctgaagatggcgagggggtactgataggaaaagaatcatgagtaaataataaacctcatatgagaaagatatacacgatatgtatctatttaagatgtaaaatgataaacgacaaaagtaagagcattaggcatggggaggcttttttgtattgtatactcctgcccatctgaaatttttagtaagaatagaattatctcaactttcagactaaaaggtatagtgtgaaagcttcagggagatttgtaacaacagtaaataaaatgaattgcgaggacaactgtctgggaagccatgacagaagtccaaaagagaagtaatggcaggcacattgcgggattggtggcagtgaaaatggaatgtgaatgacaaagatttttaagataagaaaaccatggctggcgttttttgtccattaaatgaaaagcaggaagtcagcagagtagctggtttgtggagaaagaatactcacacatcgatgtgaattatttcaattagaaaatgatactgctttcttagggctttcttaactaggggtgattctgccctccaggggacatactagcaatatctagagacattttcactgatcacaactgggtaagggtagggtggggaacgggtgtcctactgtaatctagtgaatagaagccaggaatgctgctaaacatcctacaatgtttgagcacaggatagctccccacaataaagaattatgaggcccaaaatgttaacagtactgaggctgagaaaccatgtttaagactatagttaccgaaactcaactagattaccaaactgccaaaactcagaattcttaagcaaaagattaatcagacattaacaaaacattaaacttgtcattaagtttcttcaaaaatggatggtggaaccatttccgtttaacgtttcctgcaaaatgtgcttatcaagagccctgcgcaaataacatttttgtggacagcgctgggcatttaaaagaggcacaagacaaatgggttttccgaacaataaaataatagtagtaatggctgtgaatactatgggaggtttcatcacagatgcttgccatttacttttagggacgtcgcatacgacgtccgtaaattactggctcgggttttgagctttacctggctctcgtcccctgtagtacaatcctctttattctttcaggggacaaacaacaacaaaacccgtctctcacacagacaatacaccctgacagacaagtgacccacaaacaatccctcctcaaatgaaggtaaaactagggctagaaaacgttcaactaatttaaggcaattaaccctctgaaatttttcgctgatcaaaggaacaggaattgctgttttaaaatatgcaactggcatttcacacctctacactggacgacgtattgcgtggaggatggagaaggaagatcacccctactcccaaattcgtagttataagggcgggttattagaagggcgccaggaaggtctctctacaaagatggggggccggggaactccctatttgccctattttggtcccaacactgaaccaaggaaattgcgcccaaggttgaagcacacgcaatccgtccgtcatgcagacaaatgctctttcaggggtcctaattaagtgtggaggcctgactttccttccgaatccgccccaggtgttccaccccgagcttcccctcgggcttcccctcgccacgcagcctctgaagagaggagcatctacatacaaagaggcttaaactgcccagaacctccgaatgacgaagaatcaccgccagtctcaactcgtaagctgggaggcaaaaccccaaagcttccctaccaagggaaaacctttggcctcaaaggtccttctgtccagcatagccgggtccaataaccctccttcccgcgtccgcgcttacccaatacaagccgggctacgtccgagggtaacaacatgatcaaaaccacagcaggaaccacaataaggaacaagactcaggttaaagcaaacacagcgacagctcctgcgccgcatctcctggttccagtggcggcactgaactcgcggcaatttgtcccgcctctttcgcttcacggcagccaatcgcttccgccagagaaagaaaggcgccgaaatgaaacccgcctccgttcgccttcggaactgtcgtcacttccgtcctcagacttggaggggcggggatgaggagggcggggaggacgacgagggcgaagagggtgggtgagagccccggagcccgagccgaagggcgagccgcaaacgctaagtcgctggccattggtggacatggcgcaggcgcgtttgctccgacgggccgaatgttttggggcagtgttttgagcgcggagaccgcgtgatactggatgcgcatgggcataccgtgctctgcggctgcttggcgttgcttcttcctccagaagtgggcgctgggcagtcacgcagggtttgaaccggaagcgggagtaggtagctgcgtggctaacggagaaaagaagccgtggccacgggaggaggcgagaggagtcgggatctgcgctgcagccaccgccgcggttgatactactttgaccttccgagtgcagtggtaggggcgcggaggcaacgcagcggcttctgcgctgggaaattcagtcgtgtgcgacccagtctgtcctctccccagaccgccaatctcatgcacccctccagagtggcccttgactcctccctctcctcactccatctttcctggcctctctccgggtgcttagcggacttggccaataacctcctccttttaaacgccctgaattgaaccctgcctcctgcgcatcctctttttgtgtcaccttagggttcagatttaactacgcgacttgactagtcatcttttgatctctctctcgtatttagtacttttagtcagcgagcatttattgatatttcaacttcagcctcgcggttaagagcttgggctctggaatcatacggctggaattggaattctgtcagtcgtgtggccgctctctactgtcttgtgaagataagtgagataatcttgacctgtggtgagcactcgtgagcgttagctgctgtatttaccaggtacagataagacaactacagtggatgataatgtatgtggtgataggggagtactctgatggtagaggagtgactttggttctctgcaaactcagcctgagactatcaattcagtttgtggtgagacctcgcagtgttaccttggcagatggtagaagccttccagatggaaggaaaaatgcgtgtaaaggcacaaagtgtagaaggaccctgaagctccagcgtgaggcctggcattgaatgaaatatattttgtgggttttcagctgctgaagtcataggaatggatgagaccaagaaaacaaagctgtttttgaggtatgagcggaagaagagatatcaggagactttcgaaacagtcataacggaagttaatatgatcattgctaacatttgctgtgtttcaggcactgtaagcatgtatatgggtccttaaagggactcatagaggtaggtactagtattgtttttccttttatcattgagaaactgaggtttgaagagattagtgaacttgctctagattatacagtttgtaagtggctgaaccaggatttgaactaatacaatctgactacagaggccacactccttagcactagaaaagaatggcatgccaagggcagagttatttctaggaagatgggatataagcgtcattgtcaagttgtgcaaaggggtcaacttggttgagatctaaaaaggaacactgaattcgtcaattcagaggctcgtaggaagtaggaaatccttatcttttcgtttgaaccttgagtggaacctagatattctggattaatgtataagtgaagttcatctttatatggtgacactcatactctagttgactacctaatagttcctctgccttctttcagttccgccaacatactgtgttctttaacattgtagaaccctttggctatgctagtctccttccctgaagtgttggtcctctagccctttttttgattggcaccagttagttcagatcttggctttattataaactcctctgagatatatgttccctgacagtttatctaaaatgattctctctacagttattttctattactgtgtttttgtttcctcagaggcatacatcacaatttggaattatgcattggtttatcaatttacttgtttattgtcaccctgctgcccagatatgacttcatgagggtaggatttgtatctgtttagttcattatttgtctagctataagtagtaaatattgtttgcatctatcagtgaatgagcatcttctgtttatgtagataatactgaactgttttgttttcttcaaagtaatcattaagctgaaggtaagaaaaacaagttcaaggaagtcacaccatggggaaaaaaaagtcaagtttagggctgcctcttccgggaagtgtcaaatctttagtatatttaggaataaaggtgccaaaccttatggttctttggatattgctaaggtattttcattggttagattaccagtttcattttccttattgactcaagagggctttaaactgagattgaagaagtaagaagattcctagataaaaccataaggaatggaaaaacaaaaatgataatacttgtccacaggaagtatataatcaaatgaaaagaactcaaataacaatctgtaatctatagcagagtaaagcggaagttgtaatagtgttgggggatgggggaagtcagaagaaccaccagtgaatatgaaaggagaagagaatcagagccatctgctaataaaatgggtagtcagctctttttgttttttttgtcttgttttgttttgagacagtctcgctctgtcgcccatgctggagtgcaattgcgtgatctcagctaactgcactttccgcctcctgggttcaagtgagtctcctacctcagtctccccagtagctaggattgcaggcacatgctaccacacctggttaatttttgtatttttagtagagacggggtttcacgatgttggccaggctggctggtctcgaactcctgacctcgtggaacgcccacctcggcctcccagagtgctgggattacaggcatgagccaccacgcctagccccggtagtcagctcttactgagaatattcaaagacagggcattcattttgtaagagacattccttccttcataggaagattggacctggtcttttagttcctcccaattttgagattctgtgagattgaatcggggcagagaaacatacttaatcttgaaagattaagtagaatttagatggatggataggagaaggactttccctacctttttacttcttgagatatagttatttgtaggtataatatacataaatatatgtattttttctctgtttacagacattcatagtttaataaaaaacttctttgtattatataaaggtttagatcagaactagtaaaacagaatgctgtttctttttttttcttttctattttactttaggttctgtgggtagatgtgcgggtttgttacatgggtaaattgcatgttgctgaggcttggtgtacgaatgatcctgtcactcaggtagtgagcatagtacctgataggtagcccttcaagccatacctccctttctttccaaccctcaaacagtccccagtctctgttcttcccatctttgtgtccatgttgaaatgctgttcttactacatttttttgaaggacatcaaaagagagtttgattatatcagaagcccccaaaagaagagagctactcagtggaatcaaggcatagtaaaatatagttgatccttgatatttgcaaaggataccaccatagcatagaatttgcttcatttccttttaaaacagaaatgtcattttactcctattgttatgtgttaaataagaaccttaataccagttgagatggaagtggtaggcaaagcttactagctctgataacctcctacttatcagctccaaagcatgttttaagcctttggctcagcaaaatgacatgtctctccatataagcaagagtgcttttttttttttctttgagacggagtcttgctctgtcaccaggctggagtgcagtggcgcgatctccgctcactgcaacctctgcctcctgggttcaagcgattctcctacctcagcctcctgagtagctgggactacaagagcacactaccacgcctggccaagagtgcttttaaatagttcattgtcaatgttaaatccttgagtgctcatttccttatttacctggctgttttctattcatctttcatgtctcaatttaaatgtcatgtttctttggtctcagagtaataaaaagtaaatatacttcccccatctcccgccccgcagagccttcctctgttgcccaggctggagtacagtggctcgatcttggctcactgaaagctctgcctcccagattcaagcgattctcctgcctcagcctcctgagtagctgggattacaggcgcgcgccaccaagcccggctaatttttgtatttttagtagagacagggtttcaccatgttggtcaggctggtcgaactcctgaccttgtgatcctcccaccttggcctcccaaagtgctgggattacaggcgtgagccactgcgtccagtgtaaattatacttttattttaatcctgctactactgcaagcaaggcaaacatttttgtgttacagcattacttgtatagattttaagaaaatctcattttaaatacggaaatgttaagaaaaattattgtgcctttgaccagaatgtgcctctaattgtacagttaaatctaactataaatactgcagtataaaataattatatacacattttttcacacctctttctctctatatatgcatatatacatatacatatatatacctatatgtattttttttacagacagtgatgtgtgttctgaaattgtgaaccatgagtctagtacttaatgatctgcttatctgctgccgtcaactagaacatgatagagctacagaacgaaaggtagtaaattacttaaattcaatttttccttgaaatgtgtgattagtaacccattattatttcctttttattttcagaaagaagttgagaaatttaagcgcctgattcgagatcctgaaacaattaaacatctagatcggcattcagattccaaacaaggaaaatatttgaattgggatgctgtttttaggtattctattcaaatttattttactgtctttatttttctctttcatatttatttctgttgtgatattacttttgtgtgtaagtcttaacatttatctttgcttcctatatatcattatgccttgcatatgaatttggcatttaatatttatccaaaacataatttttaaaggttgttcatatagaaacttaaaaattataaattatttcttcaataaaatgttttagacatatctcactcaaaattgagagagaatttctttcattttagttagttcacaagacttcagattagaggaaaaaattataataaatgttaggatattattttcacacctttaaatattactctgattataagtaaatgctgtgtgttaaattgtaataaaacaagtaaaaggaagattggaatacttgtgtatgaatttggttaaaaacaaaaaatacctcgaacaatgaaaaaacacaactgattgctggacaggagtggcaaacagggttgatgcatttttacattgagacatcattttcaaccgtgaaatccatttataactagaaacagattgtaaggattaggaaagatgaataaagtattttaaatactgagagtattaaataaactagaaataacatttgtagtcaagaggaagtgtgtatttagttgtccttcagtgtttatgacagattctgttttatttttagctcctgtttggtattagattgactgttacagatttgaaagcatataaaatgaaacatgcatgctgtttttcctctgattttctagtttattttaaataccacaaatataattacaacctgaagatgaatactattttgtataagctgatctggtaggtcaaatatgcacccagcattcctggctagttatgaatatcttctaggcaggcttaatttattggctggcaacattaccaactgcctaagaaacaggtagatcctgtacagaataacagaaggagttgagagaggattgagagggtccttactagcattgtaagcttttaatgacaaatttagaaaacaggcagtaaagcaatagaaagtcatagaagattaagagctttgcagaccagatattaaattggtcttgtaggagttaggccttgaaagagagatttaattgttttatttgtttttttcagctgatgtagtaatctaagcaaggtggtttaaaagttgctctttgtgatggcatgaacagcttttgaaattattataatttaagtattcaacgagtttctgaaattgcattttgttttcttgaagatttttacagaaatatattcagaaagaaacagaatgtctgagaatagcaaaaccaaatgtatcagcctcaacacaagcctccaggcagaaaaagatgcaggaaatcagtagtttggtcaaatacttcatcaaatgtgcaaacagaagtaagtgatgttataaattataaataaatggcttaacagattactgtcgcgtgagtttttttttttttttcagatcattttaaggacttaactgttgcataagtttgttctaaatagaataagataaaagttgagtgtaagtacatataatgatttttatttttattaaaaggtttttttttagggctagtcaagtgaagcagtgggagtttagaaggaacaaagaaatctgtaactggttgtgatcaattcgttgtaaacaccactgcactcaggccagcctgatttttaatattacaagttcaaatatttggggaaatttatgcaagcatagaatgacagaaatctgaggattgaagggatttatttatttaagagatagggtgtcactctgtcacccaggctggagtgcaatggtgtgatgatagctcactgcaggctgaagcttctctgttcctaagtgatcctcctgtcttggcttcctagtagctaggactacagaagtgcatcaccatgccaggctgatttttttttttttttttaagaggtgttatttcactgttctgcccaggctgatcttgaactcctggcctcaagcagtcctccccctgctcagcctccctagttattggtattacagatgtgagccaccatgcccagtgaaggaattaaaaattactgttttaactacccagtcttggatgccctctctacgtccctagcctttaggtagaagtgcagtcttcatgattgaatatactttcaaggctttcttttccatctttgaatagcattaacagtattaaaaactggccaggcgcagtggctcattcctgtaatcccagcactttgggaggccaaggcaggcagatcacctgaggtcaggagatcgagaccagcctgaccaacatggcaaaaccccgtctctactaaaaatacaaaaattaattgggcattgtggcgcacgcttgtaattccagctacttgggaggctgaggcactagaattgcttgaacccaggaggcagaggttgtggtgagctgagattacgccactacactccatcctgggcgacagagcgagactgtcaaaaaaagaaaagtattaaaaacctgtcttttgttactgcttctcccttctgagagtatatcaaaaactcctatttatgtttttagtgtgacatccttagagatgtttgaaagtagccacaatatttcctaagtcctcatctctaaagttcataatctcactttcttcagctcacgtgacctaggttttatgctactctcctctgaatattcttcactttaattgtctgtcttaaagtgtgggcctctacttacagggaagaggccagaaaaacaaacaaaaaagtgtgggactcattttttttaatacaggctcttgctctgtagcccaggctggagtgcatgcagtggtgcgatcttggctcactgcagcctccgcctcccaggctcaggtgatcctcctgcctcagcctcccaagtagctgggactataggcatgggccaccatgtctggctaatttttgtatttttaatagagacagggtttcactgtgttggccaggctagtctcaaactcctgacctcaagtgattttcccgccttggcctcctgaaatgctgggattacaagcgtgagccactgcacctggccaggactcaatcttttaggtatattctgattagtacagagtgaagcaattcttgcttatctttcattctgtactcttactgattaattctaagatcatgtgagcttccttggctgtcagaaccaacacttaactgacattttacttgctatgatttgaggaaaaaaacaacccccaaaaatatttttttcttctgatgagccaaatagttcccatctttaacttgtacaattaatattgtgaagagttgatttttcggaaccaaaatgcaggatcctggcaagcttttgtaaggaaatgggctttacacatactgaaaagctagaggcagaagtgtgtgttcagggactcctgggctcttcacagataaggatgttgctttgtgataccaactcttaatttaagaatcaggagtgtgaggcgcggttgctcacacctgtaatcccagcactttgggaagctgaggcgggcagatcacctgaggtcaggagttcgagaccagcctggccaatatagcgaaaccccatctctactaaaagtacaaaaaatagctgggtgtggtggcgggtgcctgtaatcccagcttctcgagaagctgaggcaggagaattgcttgaacctggaaggtggaggttgcagtgagctgagattgtgccattgcactccagcctgggcaacaagagtgaaactctgtctcaaaaaaaaaaaaaaaaaaaaaaaagaatcaggaaagcccccaaattggtaaatatttagtagaagtatgcagattattagtgaatatttcagattggtggtatgagacttgagtccaaagaataatggtttagtcaattttctacctcctctgagatgcgagttcgtgtggatagcttcaaccccttgtcagagactccagcagagacaaaggaaaactacaccaaaatattctgcactcacttttgctctgtgtagtagctttgtatccagtaaaatattttatttgctaataatgctgggatatagtaggtacttactgaaagagtgaatgagagaaagataacatgtcaattttgtagcccaccagaaaagtttgcaatgtgtacagtagttttgccttgcagtgaacaaaccttttaattgcaacattaacaatggagattacgtttgaaaatgcatcagcctgttggtttataagaaatagttggtgaaattatcaatgctggtcatgtaagtagttgaaaatttgtttttttatttacggcttccttttctttcaaatttgactttgttacttaaacctttttaatattggggcaaaaccagggagttactattccctcaccccacttcagttgtttttgtttgtttgtttgtttgttttttacgaaaagattggagggttgatggaaatttaacatatgtctaaactttgccattcttgcttagcattggtatccaaggtatgatgaaagaaatagagattagtaaaaaagaagtaaaaggcagctgagaagaaacaagtaagcaaatattgttgatttctctccttttttttttttttttttttttttttgagacagagtcttgctttgttgcctaggctggagtgcagtggtgcagtcttggctcactgcagcctcttcttcctgggcgcaagcgattctcacgtgtcagcctctagagtagctgggactataggcacacgccgccaggcccggttaatttttgtatttttagtagagacgagggttttgccatgttggccaggctggtctcaaactcctggcctcaagtgatctgcctgcctctgccttccaatatgctgggattataggtgtgagccaccacactcacacacccagcctactgttcatttcttttctttttttttttttgagacagagttttgctcttgttgctcaggctagagtgcaatggcgccatcttggctcactgcaacctccgcctcccgggctcaagcgattctcccgcctcagcttcccaagtaactgggattacaggcatgccccaccatgcccagctaattttgtatttttagtagagacggggtttcaccacattggtcaggcttgtctcgaactcctgacctcaagtgatccacctgccttgtcatcccaaactgctgggtttataggcgtgagccactgtgcccaccctgttcatttctttatgttagcatttgtctgcttttgtacaaagcttaaatagagtctagatagtgcaaaactcagctgcgaaaaatgttaagttccataagattcctgaaagtctctgtaagtaggctgggcacagtggctcatgcctctctaatcctagtactttgtgaggccaaggcaggcagattgcttgagcacaggattttgagaccagcctgggtaacatggtgagacctcatctctacaaaaacacaaaaattagccaggtgtggtggtgaccacctgtagtcccagctacttaggaggcttagggaggaagattgcttgagcccagggggcagtggttgcagtgagccacgatcatgctattgcactccagtctgggtgacagagtgagatcctgtgtccaaaaaaaaaaaaaaaaaaaaagtctctgcaggcaacttagttgtacttttaagaaagatttgatcccagaagtttgagaccaacctgggcaacatagggagaccccatctttaaaaaaactaaaaaaattagctgagtgtagtggtgcttgcctgtagtcctagctacctgggaggctgacatgggtagatcccttaagtccaggaggtcaaggctgcagtgagtcatgatggggccactgcactccagcttgggtgacagagcgagatattctgtctcaaaaacaagcaaaactatgaaaaaaagtcaacatttcttgaaatacttctcatatttggtagaggagggagatatattgggataaaggacataggaagataggattttattataatattaatttctgtagttattcaacacaaattaatttttattgagcatttgctattagggcagtcactgggcttttacgtcagaatatagagattaattcctttccttaaggatctaatcatacaatggatgttttagattagaaaaatgttacaaggactataagagaaatgcacagggtactagaaaaaaggatcacatggttgtgcatttcataactggacaatgcctaaaattatgaagtgagccataagtgaagatgattttgcagttatatcagtgtatatttgtttaccatagcctgtgaatataactagtttcatcataggaaaaccctaatccagaatatattcatatttacatgagttgtgttctgctcatagttatggcaataaatatattcaattttaagattgtcagtatggaaaaatggcatttctgctgtgacgtaaatataatttactgaaaatgataattaaattatttttaaatgtaattttgttaccttcaagaatatgtgtgtagtcatgccaagttttcagaatctctagtaagtaaataacatgctgttaaaaatgacacaggtacaggggtcaagcacagtggctcatacctatagtctcagcactttgggaggccaagacaggagaatcccttgagctcaggagttcaagaccagcctggggaacattgtgagagattctgtctctatgaaaaatttaaaaaattagctgggcatggtggcacaacatctatagtcccagttgctcaggaggctaaggtgggaggatcccttgagcctgagaggttgaggctgctgttgggtgtgatcatgccactgcacaccagcctgggtgatagagcgagaccctgtcttaaaaaaaaaaaattacaacctgaggtatttgtatgccataaatgctattataggacttagaactaattttgctttccaaggtaaatattctccttgtaatcttatgttattctaataaattcattcttcataaagagtgccaaaaaacttgggatcatttttggtctaacaccagaaattgtgaattattaaggttataattgtttaagaatgattgcttttcgagatgagcagatcacttgaggtcaggagttcaagaccagcctggtcaacatggtgaaaccctgtctctactaaaagtagaaaaattagcagggtgtggtggtgcacgcctctagtctcagctacttggaggctgaggcgggagaattacttgaacccaggaggtggaggctgcagtgtgctgagtttgtgccactgcactccagcctgggtgacagaccaagattccatctcaaaaaaaaaaaaaaaagaatgattgtttttgctatatattcctataaaagaggcgttggcaaacttactgtgtaaagaggccagatagtaaatgttcttgactttataggccatgtggtcacctctgtcttaattacaaaagcagccataaacaataagtaaatgaatggttgtgactatgttccaataaaatgttatttgcaaagaaaaaaaaaatgaattttgcttggggccataatttgccaatttcttctctacaaaagaagtttagttaatagtaatttcccaaatggaattatttaaatagttgccattccaagtgtcttatttttgttcaaatttatgtttttctttatttgtttattttgaaataggagcacctaggctaaaatgtcaagaactcttaaattatatcatggatacagtgaaagattcatctaatggtgctatttacggagctgattgtagcaacatactactcaaagacattctttctgtgagaaaatactggtgtgaaatatctcagcaacagtggttaggtatgttttgaaggttgttgtttgtgaatttttcctcatgaaatgaaacttcaccaaagaaagcactctgtctgtatctgtctatatcccccaagtgacctgacagtttaacagtactttagtaaaattatatggttatcgaactgacccttaatttttatttattatgtagcttttgaataaagtcatgaataatatatcaggtgcctgatatcagagctggaattacagttgaaaaataccatctccatcgtcaaggagttgacagtggcagaagaaaacccaagtaaaccagagttcataatgtgctgtgatacagacatatttgggttcagtaggtatacaaaacaatgacacctaaactcaaccatgatttaagtagaaagggagaaaaccaagagagggaagtaccataaaagtgaaagcaggcagggtgcagtggctcacacctgtaatcctagcactttgggaggccaaggccggtggattgcttgagctcaggagttcaagaccagcctgggcaacatggtgaaactctgtctttaaaaaaatagcggaggtaatggctcttgcttgtagtcccagttacttgggaggctgaggcaggaggatcacctgagccctggaggttaaggctgcagtgagctgtgatcacactgcactccggcctccatgacagagtgagaccctgtttccatttaaaaaaaaaaaaaaaaagtgaaagcaagagagttgaaagttcaaaggggcgtggccaacattttaagtgttgtagaaaggataagacacaaaagtatccattggatgaggcagttagcacgctacttctaaggtaatggaaatcaaatatattagaatagaatgcattagaagacaatgtacagaacccagtgattcattagatgtgtagagtgtgtgctagggaggaatctggtggtgtttcctgtttatagctgggaggtactgagagaccacaaaggaaggaagttatggtcagagattgaaatacttcagtttgttggtttcaaagatggagcatttctgggtttgagaataagtgaaagtaggatttgacattaacaagatgattttaagtcagatgtcaaagtcttctaatacacgaactctaaaagtttagaagcttttttttttcatggaaagtatttaagctaaattttgctagctaaattaaaagacatttgtccatattctttattgccattttattatttcaaaatgagatacatgtgaaccacaaaactactacctaatcagtaccctcactcctgcattacactctactgttcccctgagaataaatgccttctcagctaatttcttaggagtcatttgtagcctttacgttactctgaacacaagataggctgtgtctgtaacagggccctcaacaagcctagagacagcctttgggaataggctggtgatatctaggttacctaaccagatctttccccagtatggctggtcatatttaggtcattttacattatcacttacaaccatggctgtcactgaaacaaaggcagtctttcccctagtctgcttactatattctgtcatctagtttgttctctgaaaccccctttttatttttaaactaactactcttacttctttttttttcttttttctttttatttaagctaacctttgccacttcttcccggatgttacttcttataattagcttttttgtcaaagtatttttttacttagcttccttttaaaacttgcttagatgaggactctgtggaagaagcgaagtctgtgctcaaaatatatatttggtacaggtggtgactgaagccatgactatggatgagatttgtatatagagtttagtgtgagatgagaagaatggcctaagattgagtcagcatttgcatataaattttggaatcagcttactgatttctacaaaagatcttgctgggattttgatactaattgcattgaatctgttgcacaatttgagaagaatagaaatcttaacaatgtggagttttccaatccatgaacactgtatatctctccatttacttaggttttttttttttttttttttgcttctttgtttgtttttttgagacagagtctccctctgttgcccaggctggagtgcagtggcacgatctcacctcactgcaacctccacctcctaggttcaagcgattctcctgcctcagcctcctgagtagctgggattacaggcatgtgccaccacacccagctaatttttgtatttttagtagagacagggtttcctcatgttggccaggctggtctcgaattcctgacctcaggtgatccacctgcctcagcctcccaaagtgctgggtttatagacttgagccaccgcgtctggccacttgtcttttttgatttctttcattagtgttttataattgtcagcatatagattttttgttgtaaattgacaatttttttctttaattttatatattaaaaaaaatagagacaggatctcactgtgttgcctaggctggtctcaaactcctgggctcaagtgatacccttcccttgacctcccaaagtgttgggattataggcatgagccaacatgcccagctgcaaattgacatttatttataattgtataaacataaagattttgtatatgttttgttagatttatactgcagtagtttgtaattgcattgtttttaacattttgattttcaaattgttcaatgcacaaaaattatacagaagtccagttaatttttgtatagtgaccttgtattttgggaccttgctaaaatcacttactaaatctagtagctttctttgaatgttcttttggattttctttgtagacaaacatgtcttctgtaagcagtaatttttttttctttctttctgagccatgtggcttttattttatttttgtgctttattacattggctaggacctccagtgtgatttattgtggtaaaatatatataacatttataattttaacttttttaagtgtacagttgtgtagtattaagtgcattcatattgttgtgtaatcatctccaccatccatctccagaacttttttttctatactcagtaaacaatgatttaccattttcccctcccctatcccctggcagctaccattctactttctctctctatgaatttggctatttggggtacttcatttttatggattgaatgttgtgtcccaccaattatgttgaaatctaactcccaaagggatggtatttggaggtgtgggatttaggaggtaattaggtcctgtgggtccagccttcatggatgggattaatgcccttatgaaaagaggccagagagctaacttgctgtctttctgccatgtgaagatacagttcaaagtcagtagtctgcagccccaaagagggccctcaccagaaacccacaatgctggcacctgagctgctttcagcctccaaaattgagagaaataaatttctgtggtttctaagccacctaacctataatactttgttatagcagcctgaagtagaggactcctataagtatttgtccttttgcaacctgcttattacacttaccaaaatgtctttgaggctcatcagtgttacagcttttgtcagaatttcacccttattaaaaactgaacactattctgttctgtgtatatgccacattttgttaattcattcgtccattggtggacatgggttgtttctaccttctgattattgtgaataatgctgccgtgaacatgagtatacatctcctgagtttcctgctttcagtcttttgattatatacccagaagtagaattgctagatcatgtggtaattctatatttaattttttaaggaaccaacatcctgttttacacaggagctacgccattttacattctcaccagcagcccacaagggttccagtttctctacattctcactagcacaactaatagaaaatgaggattcctcttctaggccttgaaagtgctgcataattttgcttcttcctacctgtctaacttaactaaagcgcttctaatttctgtgctcaagctacactgtcaattattcagtttctcaaacctagtggtttccatttttttaaattgacttttatcttttagaggaattttaaatttacagcaaaacggagtggaaagtccactggacacacacagcatgccctactgtcaacatcttgcaccagtggtacatttgttaccatcagtaaacctatgctgggacacatcattattatccagagtccaaggttcacttttggtggtacatatgctatggattttgacaagtgttttgacatttttaaagatctttttctgtatctaatgagatggtcatatttttttttcctctgggagagaatggtaacaatttttcactattacagaatcatacagaatactttcactgtcagaaaaatcctctgtgcttcaccttttcatctcttccttcttgtaaactgtgggaaccatggatctttttgctatctccatggtttagccttttccagcatgtcatatacagttgtgcgtctcttaacaatgtggatatgttctgagaaatacatcattaggcaatttctttgttgcgtgaacgtcatagggtgtatttatacaaacttagatggtataacactacgcacctaagctatatggtattactgctcctgcactacaaacctgtgcagcatgttactatactgaatactgtaggcagctgtaacacaatggcaagtatttgtgtctctaaacatatataaacatagaggaggtacagtaaaagtatagtataaaggataaaacatggtacacctgtctagggcacttaccatgaatggagcttgcaggactggaagttgctctgggtatgtaaatgtgtggtaatgtaaaggcctgggatactatatactactgtagaatttgtaaactcttattctgtaccaaatttaaaaatttatgtttttctttcttcaatactaaagtaacattagctactataacttttttactttataaactttaaaaatgtttaaactttttgactcttttgtaataacacttagcttaaaatacaaatgcattgtacagctgtacaaaaatattttttccttatatacttatagatgttttttcttttgttctataagctttttaaatgaaattattattactctattttttcctttaaacttttttgttgaaaacaaagacacaaacacacacatgagcttaggcctacataaggtcaggatcatcagtatcactgtcttctgtccctgcatcttgtccccctgggagatcttcagggacatgcacagagctttcatctcctatgataatggtgctttattctgaaatacctcctaaaggacctacctgagactgttttactgttttgttttgttttgttttttaagaagaagaaggaggaatatagtataaaatggtgataaaaagcatagtagagtaagtacataaacctaacattttaccagtaacttagtcatttattatcattatcaaggtttatgtactatacatgattgtatgtattatacttttatatgactggcagtgcagtgggttttttttacacaagtatcaccacaaatgcttgtgagtaatttcttgtgctatgacatcactaagtatttaaataggaatttttcagttctgatacaatcttacggtaccaccttttcatattgccatttgtcattgaatagaatgttgttatgtagtatgtgactgtggttggaatcataacagtatgtatcattttcagattgccttctttcatttagtaatatgcatttaaggttcctccatgtctttctctttctttctttctgtctttctttcttttttttttttttttttttttttgagatagggcctcactctgtcacccaggctggagtgtggtggtgagatcatggctctgcagcttcgacctcctgagctcaaatgatcctcccacccccttccaagtagctgtgaccacagacacaagccatcacaccctgctaatttttcatttttagtagagataaggtcttattatgttgcttatgccagcagcttgaactcagcctcccaaagtgttgggattacaggtgtgaaccaccgttctcagctcctcgatgtctttttatggcttgataggctgaagtgggaggatcacttgagcccaggagtccaaatctagcctgggcagtgtagtgagacttccgtctcttaaaaaaacaaaaaacaaaaaaaagaggaccaaagttactgatattagaaatgaaatgagatctaattgcagatcctatagatattcaaaggataataaggaaacactatgaacatctattaatttaaatgggccagttcctcaaaaccatacattatcaaaagtcatccaatataaaatagataatttgactagtcccataactattaggagaataaattgaatccataatttaaagcctttcataagacaaattgggaacaagataaggatgtgcactctcaccactccttttcaacattatgttggaggttctagccagggtagttagacaagaaaaataaaaggcatacagattggaaaggaagaaataacactcccctttgtagatgacatgattgtctatatataaagtcccaatatacacaagtataacattgtgaataatgttatttggggactgggcacagtggcttacacctgtgatctcagcactttcggaggctgaggcaggtggatcatctaaggtcagatgatggcttcctctaaaacaggacagatttacttgtagcctattgattataaaaagcttgaggtttctctgttataactcagtccactgttttcgcagtgtcaagtgtcccatttcaccttgcctttggtactggggaactgatgcaaaaatgaaggtagtctggctaccatcattactgggagaaataaactgtcctttttctcttatcaggaatctcaggtttcctgctagcacccaggaaactgtcatgctaatttgttaggttacaagtagataaaatctcagccaggcacagtggcttatgcgtgtaatcctagcactttgggaggccaaagcaggtggatcacttgagcccaggagttcaagaccagcctgggcaacatggtgaaatcctgtctctacctaaaataccaatcagttgggtgtggtggtgtgggcctctagacccagctacttgggaggctaaggtgggaggattacctgagtctgctgagattgaagctacagtgagccgtgatcttaccaccacacaccagtttgggtgacagagtaagactctacctcaaataaataagaaacaaaccaagcagagtaaaatttcatacccttcataggtctcaacacattttttgcatattattaatcaaacagtattattattttaaaaaactgtggaggccaggcccagtggctcatgcccataatcccagcactttgggagaccaaggtgggtagatcacttgaggccaggagtttgagaccagcctgaccaacacggtgaaaccccatctttactaacagtacaaaaattagccaggcatggttttgtgcgcctgtggtcccagctacttgggagactgaggcatgagaatcacttgaacccaggaggcagaggttgcagtgagccaagattgcaccattgcactccagcctggacgacagagcaagattctgtctcaaaaaacagaagaaagaaaaacccatggagcatgtactgtaagtgctttcttaggcctagatgatggaacagaggcttagagaagttaagtaatgtttctgcgacctggctcttaaactggtgctctcacagcagtttatagttattcctgtcttaaaggcattttatataagataaaattaaatactgatggagtacttttactatgttaaaaataaattagtgcagttttaaaatcctttttctgtatgggattatggaatatttaagttaaattgtaacatttaatacattttgatttttaaaaaatcatgactaataatttttttttttttttaagaattgttctctgtgtacttcaggctctatctgaaaccttcacaagatgttcatagagttttagtggctagaataattcatgctgttaccaaaggatgctgttctcagactgacggattaaattccaaatttttggactttttttccaaggctattcagtgtgcgaggtaatctaatctctttttcttttgttttgtattgaaatacttttgatcttgcaagaccatgttttagactcagtaactaaaaattctaccttaaaataaaacattgatccatcataacagaactagtggattcctaaagagacaaccaagtccaacactttctgaatatccaatatgcagaacactacgtgaagttttcaagggggagatgtgtcttgctgatgttctgttgaccaggaaagttaaatatcctctaagtcattgcatttcccccattttgaggatggttttaatataccgagaataaaataaaataggaaaatattttggaagtattactgttgtacattagtatggcagtactcaatgtataatgtgaaacattttataaatggtgttacaaatcagttttgtttatttttatacaatgttttagcaggagggagagctaacagaagtggtctcttaacaccaaataagaactaattttttgtcagtgtgaagtaatgctgtgattttttttttaatgaatagttttgaaattaagactactgtttgaaaattagggttttgtttttttttctttcagcataccacttcataactgttcagtttgtacagtttgttccccctgttatacccagttgagcttgtttgtttcttcacagacaagaaaagagctcttcaggtctaaatcatatcttagcagctcttactatcttcctcaagactttggctgtcaactttcgaattcgagtgtgtgaattaggagatgaaattcttcccactttgctttatatttggactcaacataggcttaatgattctttaaaagaagtcattattgaattatttcaactgcaaatttatatccatcatccgaaaggagccaaaacccaagaaaaaggtataaaggaaatgtttactgttttgaatttgcttcttcattcaaacatagaagtctaagtataaaattagtgttctttaggaggatatgactttcctctggatttctctggttgataatgttacttagccatgagaatgtttttcatagagtttttagaatttgaagcagtggtagcagattctgttatgcctttctatttgttcaatacaatattaggtattatgggaaatacaaaaaaatctgagacattgttccctctaggagctacttatgcatcaatacttagatactaaggggtctgacacagactgtagggcaaaagaatttaaagaaagcaggatcttgtttatccacctgttacttttattagaagataaaatacgtaaattggactaaaaccagtcagattattcagctcctgaggaagatacatacatattactttaataggaatttgaggcagaaacagggaaattgctgccttaagcctcatagttactctagggccctgtttgccctagagtatcacttgttaaggagaatcacttattctccttaattccttcatatatgtcctataccaagagagtattgcccagaaggtatagtgcttttctgtagttaggaactttattggctggaactggagtttcctcttgctctgtctatgattgcctttgggcttatactagcctttggaccaactcatcatggctagtatagtgactttcttaaaacagcataccacattgagtaatagcagctataatggaggaaatgtcttgtagccactttttttttttttttttttttgagacagagtctcactctgtcgcccaggctgaagtgcagtgacgcaatgttagctcactgcaacctccgcctcctgggttcaagcaattctcctgcctcagcgttctgattagctgggattacagatgcccggcaccatgcccagctaatttttgtattttaatagggatggggtctcaccatgttggccaagctggccttgagctcctgacctcaaaccatccacccgcctcagcctcccaaagtgctgagattacaggcatgagccactgtgcccggccgtgtagccactttttatcaaaagtagctgtgtatttgttttatgggctcttctaataagtatatctagataatatgtagcccatgaaactactataagtgaaagaatagtgacttttaatagtttttcatcttttactcacctcttatctccaggatgaagatcaggcttattaggaggtgatatgatatgtttagggatttagttaactgcatatttagggtgaatttaaaattggcaggatgatgaggatgccagaaaagctaatgtagtttcagactactttaatagattttgtagtaccttgtttgtgagaaataatagaccttttgtttcgcatactagtcaagccacagttggattaccatgttcaccagattttgtatagtcagcattttaagttgactggaatgtgtcttgggaaagatgactgaaatggtgagaagtctgaataatatgtcatttttacactagttgaaggaacttgtaatatttttctcttaggccagaaaaaggcatacggagaacttggtcctcatatgaaagagggaacatattaattgtatttgcctcaggtgggagaataaattggagaaagacagattttaggtcagaatatggaagaaatttataagaaacacagttatctaaatgtaaaatggacagttatgaaatagagtttgtcaaggatcttgtcagaagaggcattagtactgaatggaaggttggaccaggtgtcttctaacgctgatgcagcttgacagctgaataattttgtgggagctagcagtgtaaacagagtacatacataaaaattacattttaattttttggattacaggtgcttatgaatcaacaaaatggagaagtattttatacaacttatatgatctgctagtgaatgagataagtcatataggaagtagaggaaagtattcttcaggatttcgtaatattgccgtcaaagaaaatttgattgaattgatggcagatatctgtcaccaggtacagtaagtaggtcatgtcacatttagaaatttcctgttaattttttttttaaactgggcattttgggcttttaaaacctgtgttctcacaaaaagcctataaaatgactctgtacatgcaactattcctttcaaactatcagaaatatttggaattacccttttaacttaaaagttaatgcttttgcagatatttgaaaactaacaatgaactttttcattcttaaatgattgtctctaggaaataaggtgaccctaaccctaatgattcgattcgactcgactgtattctacaaagtgctgggattacaggcatgagccaccaagcccagtctgtttcttttttgcaattaagctagagttcacatagcataaaaatcacgattttgagttgtacatttcagtggtttttagtatttttactatgttgtacaaccatcatcactaattctggaaactttttttattttatttttatttttttgagatggagtcttgctctgtcacccaggctggagtgcagtggcacaatctccgctcactgcaacctccctttcccgggttcaagtgattctcctgcatcagcctcccgagtagctgggactacaggtgcctgccaccaagcccagctaatttttgtttttttagtagagactgggtttcaccatattggccagcctagtctcagactcctgaccttgtgatcctcctgcatcggcctcccatagtgctgggattacaggcgtgagccaccgtgcccagcccagaacttttttatcatcccaaaagaaacctcatcccttcttagcattcagtcccaattccctgcatctcctagatcctggcaaccagccactaatcaatcttggtttttgtggattttcctgtttgggacagttcgtttaaatggaatcatacaatatgtgagtcttttgtgtctggtttctttcactaagcataatgttttcaaagttcatgttttaccatgaatcagtacttcattcatttttattgctgaataatattcagttgtatggatatactccattttacttacccatccatcacctgatggcctaatgtttcttaaataaaactctgttccccagagatttggttaacatcctgagtagtaatttcactctgtcaaatattttcttaatatttcttaaaatttcttaaatttaaaaaattgaatccctttgaaagtaaaggtttttgctttacttttagatttcttagtgcttttagtaaatgttcccaggaaataaaactaatgcattacttggtaatacctgctttctaaagtgccattactgtcatgcaaaatgtttgtttcttactatgttatcagatttatatgtttctgtaatgtattactcttgctttatgagttccctgtatcttcatttcagaaagaattttttttccccctaatgaaatattagaagacaatagcaatgaaaaaagtgtatttggccaggcgtggtggctcacacctgtaatcccggcactttgggaggccaaggcgggcagatcacctgaggttgggagttcaagaccagtctgaccaacatggagaaactctgtccctactaaaaatacaaagttagctgggcatggtggtgcaagcctgtaatcccagctactcgggaggctgaggcaggagaatcacttgaacctgggaggtagaggttgtggtgatacgagatcgtgctgttccactccaacctgggcaacaacagcgaaactctggctcaaaaaaaaaaaaaagaaaaaagtggatttatttttattttacaggtttttaatgaagataccagatccttggagatttctcaatcttacactactacacaaagagaatctagtgattacagtgtcccttgcaaaaggaagaaaatagaactaggctgggaagtaataaaagatcaccttcagaagtcacagaatgattttgatcttgtgccttggtaaagtgttaccattttctcattcagtgtcattttaatctcttgtatgttatttttcagaaaactttcagtggaatcctttcatctcaaccagaactaagtcatttgtctacccccaaacctattactagcaaagggatatgtgattgccatgacaaatgagatcaatcattaatggctcatttgcttgggccaagtgcagggccacctattttaatcatattgtcatagcaagttaagaaggaggactggctctctgataggcaattagaagtgtgcacctcatggaattcactgaattgtacgcttcaacaatagattttagcatacgtagcaccttctaatagaattaggaagaagttaaagataatcttaagaaatcacagaataattttgaccttatgccatgataaaaagttattttctcttattttctatcttctttattctcatgtaacgttcacatatatttaagtaatcaaataaattatggatactttggaatcccaaaatattagatctggtaaggatgtttagaatttatctagttcagcctgtttgctttactgaaaagaaactgaaacccagagaggttaagcaacttctgtaaggacagagatttatagattatagtcaaactcgtgatcagtgctcttttgattaccatgttgatggaatgtttaagtgtaagtgacttctggggaaaagcatattgatttagatacctattgcttaagctcatttttatatagttaagagtagctatttaagattcttaatttgtccttttagtcaagagtaatttattgaacacctgttatgggctaagcgttagatatacagagatgaataacataagactcctattcttaagtatcacacattctagagaatacacagcaaatgtttattggattaactgaattaatgtaaaggaaaaacagttttttgggtttctttgttttcctgttttagaggaatcgtttggtgactaaagagcaaggatgtacaagataactcagaaataaaatattgctaaatatatatatatatatatattttctgagacggaggctcactctgtcacccaggctggagtgcagtggcacaatcttggctcactacaacctccacctcccaggttcaagcagttatcctgcctcagcgtcctgagtagctgggattccaggcatgtgccaccatgcccggctaatttttgtatttttagtagagactgggtttcaccatgttggccaggctggtctcaaactcctaacctcgtgatctgcctgccttggcctcccaaagtgctgggaaaccacctggcccaaatattgctaatttaatatcctttaaaatatttgtttaagggaaacttaacagcttacccagctagccaaacgttgacaattttcctgccaatttaggaagtaggacatagtaactattaacagccagtttatttttagagtactatggaaatgatggtgattctctaattaggatattgtaagagtaccatgtctatatatttccttttagtttgttaatgtgatggaatagttttcaaattatccttttttttttttttttaggctacagattgcaacccaattaatatcaaagtatcctgcaagtttacctaactgtgagctgtctccattactgatgatactatctcagcttctaccccaacagcgacatggggaacgtacaccatatgtgttacgatgccttacggaagttgcattgtgtcaagacaagaggtcaaacctagaaagctcacaaaagtcagatttattaaaactctggaataaaatttggtgtattacctttcgtggtataagttctgagcaaatacaagctgaaaactttggcttacttggagccataattcagggtagtttagttgaggttgacagagaattctggaagttatttactgggtcagcctgcagaccttcatggtaagttcagcatgcattatgtctgacttacagataaacacacacagacacacacacactcacatatccctgatcattttcatagtttgttacttcagttaaagatgtcaaattctatttcagatgcttttcttgtttggccgagaagacttaataaatgcataagtgaatttagtttcaaatgttgacaaattattaaagactaatgttaaggaatttcttttttagttaaaaaatttttaattgatctataatagagttatatattatcaaggtacatgtgataatttgacacactcatatgacacactcatgtagggtgatgggatatcagcaccctacgtatcttttcttcatgctaggaacgtttgaattattctcttcttgctgtttggaaatgtacaatagattaatgttaaccgtagtcaccctactgatgtatcggacaccaggtcttattccttctaattgtatacgtgtatccaaaagactttctttaaagaattatgaagagtttaaatttcttttatgtgcaatttatcattatttattaaatagccatgtttaaattgtagtactatgcactgttaataaacgagctattttttaatcaagaatcttcccaaatgtaatcagacttttaacagtttttatgttcatttagtcaccttaactaaatgtatgtgccaggcactgtcctgatagataaagtctttgcccctccaatagcttgcttttcacaattgtcctttgttttgttatagtcctgcagtatgctgtttgactttggcactgaccaccagtatagttccaggaacggtaaaaatgggaatagagcaaaatatgtgtgaagtaaatagaagcttttctttaaaggaatcaataatgaaatggctcttattctatcagttagagggtgacttagaaaatagcacagaagtgcctccaattcttcacaggtaatttaagttcattagcatgctgctgttttttttgtttgttttatcaggctctctccacttatttgatgccagatggctttattttataataataatgcagaatttcccagatctaaccttaattattaaatattatgtttgtttttacagttatctgtgtctttatgcctgattgcttctgaaataaagggttgtctcactgtgagaatatgggggatgtgcatgaaaaatgcacatataattctttgagcatttatgtgttcctttctgattttttaaataagtaagtccatatatttgagtcatgtagatcctggatcctttctcataatgggagtgtcttttgggtaaaagatgttttatgaatgaggtgaggaaacgaggaagacaaaacaggatgtaagcactaggataaaggaatggagtcactcgtccacttaacctttccacagattggtaattggaaccaaatgattggagagcagacctccgaatggatccaattaaagtacttttgctttaattttacaaccttttatttatttcagaaataatgttaaacatgctgtttctaaacagtattggaaatgataataacaatggttgtcctccttaaattgtccttttagatattaagaaatttagtatagatgaaagcaattttaatctaggatccaaattttagaagtcaagatttatagctaaacatggatgttaaagtttaaagtattctttacatggcttttggtcttctaagtgaagctttttgtttttctttgtagtaattttcctcatcttgtactggagaaaattcttgtgagtctcactatgaaaaactgtaaagctgcaatgaattttttccaaagcgtgccagaatggtatgttatctaataatgctctttatcattttaagctatagctttaattacaaagatgataattttagctgggtagtagctgcatcttaataattgtaaactaaattggtccaaaaaaattgcaactgttagccagggaagaggttgttttaattcagtgattgtaatctatgttatataacattagaccaagcttactattttttaatgctgtatagtataatatgtgacaagtgccaatgagaaaaactgaatggttatgctgggaaattaagaatataaaatttatatgaaataagttcttaaagatgttacccatttctgtacatcaactatgatttgactatttgttagctttaaaaactaatgataattgaaaacaaaaataaatctaaacctgagtttagttgattgactcaagagacttagattgtattgctgtgactgaaaatgactcactggcacaaacattccttatctccctcaagagggcaaaaggatgcgtaactgcttacctataccagatgttaaaggtttttaaacctatgctctttacttcctctgcttggtgaaaaaagggatatgtttgcagacaatgttatgcttaacatttatatctggtgtttttaaaaatactttctgaatttgcctttgagattataacttgtattttttctctatctattagtaaaatttgctactgaataatgacatttgatataagtaggtctcaaagtccgaagaagagaagcatttaaaagaataatctattaattatataagtagtctttgaatgatgtagatactaggttaatgttttcctttgtaatatattgctaatacatataaggcaaagcattaggtacttggtttatatattaaagatcttactttcttgaagtgaacaccaccaaaaagataaagaagaactttcattctcagaagtagaagaactatttcttcagacaacttttgacaagatggactttttaaccattgtgagagaatgtggtatagaaaagcaccagtccagtattggcttctctgtccaccagaatctcaaggaatcactggatcgctgtcttctgggattatcagaacagcttctgaataattactcatctgaggtgagattttttaaaaaaagaactaagcttatatatgattcaactttggtaaactgttaggaaggagaaataggggcaggaaaaacagcaaggatggtgggaggcttcattttaaaagcaaagtggcagtaaagggctctaaattggacaacttagcataattaaaggaaaactcaagaataataatttgagtacttcctttgtactggaaattatggtagacataaaataattccttgtgtaggttagtgaggaatagtaagagtttgagcatagggattatatgatgaaaaaaacctctaaatacaaaggagggaaatgttacagtaatagaaaagaacacgatgtaaacaaatctaatagattttggtggcatctgaagagagatgagtgattagtaaagacaataaatggactagcaattattttagacgtcatctaggaatttcctttagcctcaaaatcacgagttctcttcatgtatactattctcttgccaaaacttgcattttttaaaatgtgaaatgtctttctacctatttctgtgtattcagatcatccacatgtgaaaatccttgctaacgcctttcttagaatctcagaaagtaagattctaagaatttttatttttgagacagagcctcgctctgttgcccaggctggagtgcagtgacgtgatcttggctcactgcaacctccgtcttgcagttcaagcaattctcctgcctcagtcttccgagtagctgggacaggcgagtgctaccacgcccaggtaatttttgtatttttagtagagatggggttttgctatgttggccaggctggtcttaaactcctgacctcaggtgatggacccgcctcagcatcccgaagtgctaggattacaggcgtgagccacggtgcctggcctaataatttttcatcttttaatttcatagtacttaatgtttcacatttttaatggcagttagcatcttctttataccatggatatttacatatggtttgtatacaaatatctcttgaactataactcttaaacataaactcttaaaagggcatacatgtttttatttatctttatatcctccacagtgccttattacatggtaaatgattaaataaagcctacaatccattcaaaggagtgaattcggtagccagggaaaatgacttgaggacatgagaggggacagtgtgcctctttatgatctttactgacattcttctgcaccacaattgtaaccactttcattacaaagtaatttagttttgtatattttctcctaaaatgccgtttcctaccctgtaggaacaaaaaaaatctgaacattttgtgtgtaacttagcagattcttagtaattctataaaattgtctaaacttttttttttttttttttttgagatggagtcttgctctgttgcccaggctggagtgcagtggcctgatctcggctcattgcaaccttcgcctcctgggttcaagcaattttcctgcctcagcctcctgagtagctgagattataggtgcctgccatcacgccctgctaatatttgtatttttagtagagacaaggtttcaccacgttagccaggttggtctcgaactcctgacctcaggtgatctgcccgcctcggcctcccaaagtgttggggttgtaggcgtgagccaccatgcccggccagctgtcaaaacttgtatctactagaaaaaatgttttatgctattctgtggagtctaaaaagctgaataagtcaaggttcctattcttcagaagcttaaaatgtcattttaatgtctctttatatgactgtaatttctacttgtgttctaagacttacagtcatttatttgcctgtgaagctttttttcttttctttcatccctacctcaaatatttaagggcctatgtgtacagtacaccctccaccctaagatgatatatcctgcttggccatcaggagatacttaggctatttttcttgagaatcctggttataattctacagtgatctcctagttgtttttagagctatccaggatatgccacctttaactcagttaactgaacttttgttttttaatatgtatgtagaatttgttcttacaaaagatagagtatactaaattatttatgaaatatatatatttttatttgtggtttactttaagattacaaattcagaaactcttgtccggtgttcacgtcttttggtgggtgtccttggctgctactgttacatgggtgtaatagctgaagaggaagcatataagtcagaattattccagaaagccaaggtaggagaatttatactaataaagtttcggataaatttgaatgaaatgtattcctgtgaaaattattacatttgtttggaagacattaaattttatgcaggttaaccctttctcttttatttatgtaatgtgagaagaaattatactatgtattttttaaattgttttaattgtttaatttttaattattattatactttaagttctggggtacatgatgcagagcatgcaggtttgttacatagatatacagtgccatggtggtttgctgcacccatcaactcgtcatctgcattaggtacttctcctaatgttatccctcccctagcccccgaccccctgtcaggccctggtgtataatgttcccctccctgtgtccatgtgttctcattgttcagctgccacttatgagtgagaacatgcagtgtttgtttttctgttcttgtgttagtttgctgggaatgatggtttccagcttcatccatgtccctgcaaaggacatgaactcatccttttttatggctgcatagtatatcatggtgtatatgtgccacattatctttatccggtctatcattgatgggcatttgggttgcttccaagtttttgctgttgtgaacagtgctgcaataaacatacgtgtgcatgtgtctttatagtaaaatgatttataatcctttgtgtatatacccagtaatgggattgctgggtcaaatggtatttctagttctagatccttgaggaattgccacactgtcttccacaatgattgaactaatttacactcccaccaacagtgtaaaagcattcctgtttctccacatcctgtccagcatctgttgtttcctgactttttaatgataggctgtaagcatgaaactctttcttatctcttggtagtactctgtcactggtatgatttgcaagaacagagtataagatttgccattttaaaaaattgttaatgagttttgcttatactgtatgactacgtggaacttctaaaaacatttcattttttctcttaagtgcactttattttttattttatagtatgtccaagatcaaagtacactgtaaaaagcaatactaaactataattttaactggaatttgcatttttccttctattcacaatagtctctaatgcaatgtgcaggagaaagtatcactctgtttaaaaataagacaaatgaggaattcagaattggttccttgagaaatatgatgcagctatgtacacgttgcttgagcaactgtaccaaggtaagattttcttcttcttgttttgttttttgagataggatctttctctgtcacccaggctggagtgcagtgggattgtcacaactcattgtagccttgacctcctggtttccagcaattctcctgcctcagcctcccaagtaattgggactacaggcatgtaccacctagctaaaattttctttttacttgaaagtgtagcctatgcagggaattgatcactggttggtgttactgttttggtgtccactcgtaagtttattttttacttttatttttcttttttttgagacagtctctcactctttcacccagagtgagtgatcacatcactgcgatccagcagcctcgacctcctgggctcacagcagcctcgacctcctgggctcaagtgattctcccacctcagcctccttagtagctgggactacaagtgtacaccaccatgcctggctgatttttgtatttttgtaattttttgtattgatggggttttacacattgcccaggctagtctcaaaccctgggctcaagtgatgcttacatctcaaagtgctgtgattacaggtgtcagctaccatatctgttcacattcataagttatacaaattgatttaaaattcagttgaatggtacataaaggtaatatccagacaaataagcaataggaatctgagtttctcatgaaactaattttataatttcaggaatttttctgagattgccttatgacttttatatacaaccatatagatgactcttttattcctgggacactttcattcatttaataaaaattttttgacccaaactatgtggtatgcgtagcggggctagtgagcaacacaacaataactccagcacatagtttactttcttttgctcagatcaccttacataacatttggtagaaagagtgctactgtgtttaatctttgtttttatctgcagcagcctgtgggatagccaagccaggccccagagtattgataataattggaaatatatttcaaacctagtattaggtacatggccatatagcaatattatcaacatatttcttggttttgtaatgtgtttttcctcctttttggtgtaagtggggaaggagaaaagtagaataaactctaacctataattatagctcacttatctttagggtcaatagctgttactttaatgttgttaaagcacaatgaaagatgtacagtatagttattataactctaagaaaagatgtgtttttgaagcagcatatatattggccctaatagtaaactatttatctacattccattcaagatagagaaaacactgtctgccgagaataattgtttttatttctttgttgcttggttctttgtttgtcttaattgcagaagagtccaaataagattgcatctggctttttcctgcgattgttaacatcaaagctaatgaatgacattgcagatatttgtaaaagtttagtaagtatgcttcctgttttgctatcatattttgattctaataggcataatttttttgttgaaatatctttgtaaataaggatgcatctcacaacatatagctcttaacatttttacaaatgtggaaattaaggccaggtgcggtggctcatgcctgtaaccccagcactttgggaggccgaggtgggtggatcacaaggtcaggagattgagaccatcctggctaacacggtgaaaccccgtctctactaaaaatactaaaaattagccaggcgtggtgacatgtgcctgtagtcccagctactcgggaggctgaggcagaattgcttgaacctgggaggtggaggttgcagtgagcgaagatcgtgccactgcactccagcctaggcgacagagcgagactccatctcaaaaataaaaaaatttaaaaaattaaataaaatgtggaaattaaataatttgtcttgtggggaaatatacctgattgcttcttaatatcaatacctagcatagtagtgcctgcctttagtttctcaataaataatacatttaaaaattgggaacgaatcatccaggctcacagctatatctgcgcaacattgtaccaaaatttaaaataattatttgttctttaaaagtgaccaaaaatcttgccaggcaagcaacatattcttattgtagtatttatttttcttccatacaaatgggcttatgccacatacattcttttttctggaacactgccgggcatacaaagtagttattgaaatatctattgagtgaaaacatattctgtaacttatttccattttatgacacatcttaatcattttccatgtcactgtacttattttataagctatctgctgttatactttatttatttagcagtgcatggtattctattgtgtggtgatagtgaatagtatatatgtatatgaaagcttatctgctctttttttttttttttttttttgagacaaagtcttgctctgttgcccgggctggagttcagtggcacaatctcggctcactgcagcccccacctcctaggttcaagagattctcctgcctcagcctcccaagaagctgggattacagatgtgtgccaccacaaccggctaatttttgtatttttagtagagaccaggtttcaccatgttggccaggctggtctagaattcctgacctcaaatgatctgtccaccttggcctcccaaagtgcttggattacaggtgtgagccaccacactgagccaaaaagcccatctgctcttaattaacattttaagtggtttctagttttttgggttacaaagacttctgtggtacagattattgtacttttgtctatttgtatttgtgtgtatgatggatgtaggataatttctagcagtagacttgcttgttcaaaaggaatgcgaattttactttttgatggatattgtcattgtcctccaaaatagtcataccaatttaggcattttcctacaccctctttgggtaacactttaggtgttacaaaacttcttaatataagaaataattttgagggaggagccaagatggccgaataggaacagctccggtctacagctcccagcgtgaacgacgcagaagacgggtgatttctgcatttccatctgaggtaccgggttcatctcactagggagtgccagacagtgggcgcaggtcagtgggtgtgcgcaccgtgcgcgagccgaagcagggcgaggcattgcctcactcaggaagtgcaaggggtcagggagttccctttctgagtcaaagaaaggggggacggacggcacctggaaaatcgggtcactccccgaatactgcgcttttgcgacgggcttaaaaaacggcgcaccacgagattatatcccgcacctggctcggagggtcctacgcccacggagtctcgctgattgctagcacagcagtctgagatcaaactgcaaggcggcagtgaggctgggggagggatgcccgccattgcccaggcttgattaggtaaacaaagcagccgggaagctcgaactaggtggagcccaccacagctcaaggaggcctgcctgcctctgtaggctccacctctgggggcagggcacaaacaaaaagacagcagtaacctctgcagacttagatgtccctgtctgacagctttgaagagagcagtggttctcccagcacacagctggagatctgagaacgggcagactgcctcctcaagtgggtccctgaccctgacccccgaacagcctaactgggaggcaccccccagcaggggcacactgacacctcacatggcagggtactccaacaggcctgcagctgagggttttgtctgttagaaggaaaactaacaaacagaaaggacatccacaccaaaaacccatctgtacatcaccatcatcaaagaccaaaagtagataaaaccacaaagatggggaaaaaacagaacagaaaaactggaaactctaaaaagcagagcgcctctcctccaccaaaggaacgcagttcctcaccagcaacggaacaaagctggatggagaatgactttgacgagctgagagaagaaggcttcagacgatcaaattactctgagctacgggaggacattcaaaccaagggcaaataagttgaaaactttgaaaaaaatttagaagaatgtataactagaataaccaatacagagaagtgcttaaaggagccgatggagctgaaaaccaacgctagagaactacgtgaagaatgcagaagcctcaggagccgatgcgatcaactggaagaaagggtatcagcgatggaagatgaaatgaatgaaatgaagcgagaagggaagtttagagaaaaaagaataaaaagaaatgagcaaagcctccaagaaatatgggactatgggaaaagaccaaatctacgtctgattggtgcacctgaaagtaacggggagaatggaaccaagttggaaaacactctgcaggatattatccaggagaacttccgcaatctagcaaggcaggccaacattcagattcaggaaatacagagaatgccacaaagatactcctcgagaagagcaactccaagacacataattgtcagattcaccaaagttgaaatgaaggaaaacatgttaagggcagccagagagaaaggtcgggttaccctgagagggaagcacatcagactaacagcggatctctccgcagaaactctacaagccagaagagagtgggggccaatattcaacattcttaaagaaaagaattttcaacccagaatttcatgtccatccaaactaagcttcataagtgaaggagaaataaaatactttacagacaagcaaatgctgagagattttgtcaccaccaggcctgccttacaagagctcctgaaggaagcattaaacatggaaaggaacaactggtaccagccgctgcaaaatcatgccaaaatgtaaagaccattgagactaggaagaaactgcatcaactaatgagcaaaataaccagctaacatcataatgacaggatcaaattcacacataacaatgttaactttaaatgtaaatggactaaatgctccaattaaaagacacagactggcaaattggataaagagtcaagacccatcagtgtgctgtattcaggaaacccatctcacgtgcagagacacacataggctcaaaataaaaggatggaggaagatctaccaagcaaatggaaaacaaaaaaaggcaggggttgcaatcctagtctctgataaaacagactttaaaccaacaaagatcaaaagagacaaagaaggccattacataatggtaaagggatcaattcagcaagaagagctaactatcctaaatatatatgcacccactacaggagcacccagattcataaagcaagtcctgagtgacctacaaacagacttagactcccacacattaataatgggagacttttaacaccccactgtcaacattagacagatcaacgagacagaaagtcaacaagtatacccaggaattgaactcagctctgcaccaagcagacctaatagacatctacagaactctccaccccaaatcaacagaatatacatttttttcagcaccacaccacacctattccaaaattgaccacatactgggaagtaaagctctcctcagcaaatgtaaaagaacagaaattataacaaactatctctcagaccacagtgcaatcaaactagaactcaggattaagaatctcactcaaaaccactcaactacatggaaactgaacaacctgctcctgaatgactactgggtacataacgaaatgaaggcagaaataaagatgttctttgaaaccaccgagaacaaagacacaacataccagaatctctgggacgcattcaaagcagtgtgtagagggaaatttatagcactaaatgcccacaagagaaagcaggaaagatccaaaattgacaccctaacatcacaattaaaagaactagaaaagcaagagcaaacacattcaaaagctagcagaaggcaagaaataactaagagcagaactgaaggaaatagagacacaaaaaacccttcaaaaaattaatgaatccaggagctggttttttgaaaggatcaacaaaattgatagaccgctagcaagactaataaagaaaaaaagagagaagaatcaaatagacgcaataaaaaatgataaaggggatatcaccaccgatcccacagcaatacaaactaccatcagagaatactacaaacacctctacgcaaataaactagaaaatctagaagaaatggataaattcctggacacatacactctcccaagactaaaccaggaagaagttgaatctctgaatagaccaataacaggatctgaaattgtggcaataatcaatagcttaccaacaaaaaagagtccaggaccagatggattcacagccgaattctaccagaggtacaaggaggaactggtaccattccttctgaaactattccaatcaatagaaaaagagggaatcctccctaactcattttatgaggccagcatcatactgataccaaagccaggcagagacacaaccaaaaaagagaatgttagaccaatatccttgatgaacattgatgcaaaaatcctcaataaaatactggcaaactgaatccagcagcacatcaaaaagcctatccaccatgatcaagtgggcttcatccctgggatgccaggctggttcaatgtacacaaatcaataaatgtaatccagcatgtaaacagaaccaaagacaaaaaacacatgattatctcaatagatgcagaaaaggccttggacaaaattcaacaacccttcatgccaaaaactctgaataaattaggtattgatgggacgtatctcaaaataataagagctatctatgacagtcccacagccaatatcatactgaatgggcaaaaactggaagcattccctttgaaaactggcacaagacagggatgccctctctcaccactcctattcaacatagtgttggaagttctggccagggcaatcaggcaggagaaggaaataaagggtattcaattaggaaaagaggaagtcaaattgtccctgtttgcagacgacatgattgtatatctagaaaaccccactgtctcagcccaaaatctccttaagctgataagcaacttcagcaaagtctcaggatacaaaatcaatgtacaaaaatcacaagcattcttatacaccaacaacagacaaacagagagccaaatcatgagtgaactcccattcacaattggttcaaagagaataaaatacctaggaatccaacttacaagggatgtgaaggacctcttcaaggagaactacaaaccactgctcaaggaaataaaagaggatacaaacaaatggaagaacattccatgctcatgggtaggaagaatcaatattgtgaaaatggccatactgcccaaggtaatttacagattcaatggcatccccatcaagctaccaatgactttcttcacagaattggaaaaaactactttaaagttcatatggaaccaaaaaagagcccgcatcggcaagtcaatcctaagccaaaagaacaaagctggaggcatcacactacctgacttcaaactatactacaaggctgcagtaaccaaaacagcatggtactggtaccaaaacagagatatagatcaatggaacagaacagagccctcagaaataacgctgcatatctacaactatctgctctttgacaaacctgagaaaaacaagcaatggggaaaggattccctatttaataaatggtgctgggaaaactggctagccatatgtagaaagctgaaactggatcccttccttacacctgatagaaaaatcaattcaagatggattaaagacttaaacattagacctaaaaccataaaaaccctagaagaaaacctaggcattaccattcaggacataggcatgggcaaggacttcatgtctaaaacaccaaaagcaatggcaacaaaagacagaattgacaaatgggatctaattaaactaaagagcttctgcacagcaaaagaaactaccatcagagtgaacaggcaacctacaaaatgggagaaaattttcgcaacctactcatctgacaaagggctaatatccagaatctacaatgaactcaaacaaatttacaagaaaaaaacaaacaaccccatcaaaaagtgggtgaaggacatgaacagacacttctcaaaagaagacatttatgcagccaaaaaacacatgaaaaattgctcatcatcactggccatcagagaaatgcaaatcaaaaccacaatgagataccatctcacaccagttagaatggcagtcattaaaaagtcaggaaacaacaggtgctggagaggatgtggagaaataggaatccttttacactgttggtgggactgtaaactagttcaaccattgtggaagtcagtgtggtgattcctcagggatctagaactggaaataccatttgacccagccatcccattactgggtatatacccaaaggactataaatcatgctgctataaagacacatgcacacgtatgtttattgtggcattattcacaatagcaaagacttggaaccaacccaaatgtccaacaatgatagactggattaagaaactgtggcacatatacaccatggaatactatgcagccataaaaaatgatgagttcatgtcctttgttagggacatggatgaaattggaaatcatcattctcagtaaactgtcgcaagaagaaaaaaccaaacaccgcatgttctcactcataggtgggaattgaacaatgagatcacatggacacaggaaggggaatatcacactctgtggactgttgtggggtggggggaggggggagggatagcattgggagatatacctaatgctagatgacgagttagtgggtgcagcacaccagcatggcacatgtatacatatgtaactaacctgcacaatgtgcacatgtaccctaaaacttaaagtgtaataaaaaaaataataatttttaaagtttgcatattattttgttatgtagacatattacaggttatatatccattttactattgttggacatttagtagaaaaagtactgtagttttcatacttacacatgaaccttgaattgtttgattaggtaaattttttttttttttttttttttgagacagagtctcgcttcgtcaaacccaggctggagtgcagtggcatgatctcagctcactgcaatctctgcctcctgagttcaagtgattctcctgcctcagcttcctgagtagctgggattacaggtgcccaccaccacacccagctaatttttgtattttaaatagagacaaggtttcaccatgttggccaggctggtttcgaactcccgacctcaggtgatccacctggctcagcctcccaaattgctgagattacagatgtgagccactgtgcccagcctgattaggtaaattttgactacagcatgctcctgcaagaagccatcttgaacatctttgtttctcttccttgaaggcatccttcatcaaaaagccatttgaccgtggagaagtagaatcaatggaagatgatactaatggaaatctaatggaggtggaggatcagtcatccatgaatctatttaacgattaccctgatagtagtgttagtgatgcaaacgaacctggagagagccaaagtaccataggtaaatacatatttactacttgggatttcttttacttctttatattgatttggcagtataagaggcctcattgatatcaattttgtgcttatttcattttctcttagtatagccttttaggattgttcctttcttatatactttattttttttttatttttacttgaatttattagtttcatattttattcttcatagaaggaacttaagataactattaaagaaataaaaccaggccaggcatggtggctcacgcttgtaatctcagcactttgggaggccaaggcgggctgatcatgaggtcaggagatcaagaccatcctggctaacgtggtgaaaccccatctctactaaaaacacaaaaattagatgggcgtggtggcgggcgcctgtagtcccagctactcgggaggctgaagcaggagaacggcatgaacctggggaggtggaggttgcagtgagccgagatcatgccactgcattccagcctgggcgacagagcgagactccgtctcaaaaaaagaaataaaatcatatgataggttatttcctcaatagaaagcaggaaatgaaaacacacctgtaatgccattgcttttaacctttttctattatttctctgtagaaacattcaaaattgtagtcaacatcaacattcacatgttatgaatgcctgtttaattataagtatttttccaggtagttgcttttcttgatagtcatactttttaatggcttcaccatttttctgtcataaataccataatttacttgacattttttattgtcagaaatttagattcttttctattttcctacaataaacattattgcaatgatcatttgtctaagggtttttttttctcatattttaaattatttcttgacaacagaatcttggataatttttcaaaaagacttttgaagctttcagtatataattaatttcactataattttgcttttcatatacttttttttgtgaagaggaggaaatttgagttaatatgactatatatggctgttgtgcccttctcttagtgttaatgagtgctttttatttttaggtgccattaatcctttagctgaagaatatctgtcaaagcaagatctacttttcttagacatgctcaagttcttgtgtttgtgtgtaactactgctcagaccaatactgtgtcctttagggcagctgatattcggaggaaattgttaatgttaattgattctagcacgctagaacctaccaaatccctccacctgcatatggtgagttacgttaaatgaagaagctcttggattttatctgatgttgctgactaaatgtaatgagttgacatgtaagaatcacatggtgtctttgaagaattgaaattgctttcttgagaaatgaacctgagactagttggaaaataacacttttaacgtgctgtgagcaaatttaagtggatgctgaaatattaaaacttagatgggttttggatagatttattctctttaggtttaattgttataaattattttaattaggctaagaaacatagaccctgaatgtaaaaatattacataacattgtgtttgaagttggaaccttgcctttgaccttagtttatatattttcagttttttggatttgatttcaaaatgatagtgaagttacaagaatactacagttaacgttttaccatatttgcttaatcattccctctctccacacacacactcatacgcagatacacacatcattttctctgaaccattttgagatgaaatcgcacacgtgatgctccttatacttcagtgtatatttcctaaaaacaaggatacacttctgtttagccacagtataatcatcaaaatcaggaagttaacattttgtcattgcatttaggtgtgtagtctgtttagtctccttcaatctggaacagttcttttttttatttatcatgaccttcatatatttgaatagtacaggtcccttgctctgagtttgtctgatgtttccttatgattaaatttatactttgacgagaatgttgcaaaagtaattcctcttctgccttcaccctgtccatttatctgtctgttgatagatatcttcaaatccaagccaacatcacacagtttatctttttttctgtccaaatttataaattgctttactagcagttaaaaaaaacaccccaaaacctgactatccactcaacctgaatgcatttacttatttgctcaacaaccttatatataactaatctaaccatgtgggccattttcttagccctagccccagtgtatgtggaggtagagcctctggcctagcgagtagcaagttgggtcctaggtcatgtccccagttccagcaaattgtcacacatgcctggtgagtccctaattagaacctctgatcacagtaaattgtaggctgagtcattggtggaatccctggtcatgtttcccacccttggtgaaaatgcacgtcaatcccttagagtgagaagacaagtttggttgtggccctgtttgggcccctggtttaggtcctcgcagatactcaagtctctatccctgaccaagaggaagttacatgcttttcttgaagtattgatgtttcaagtcacttcagaacattcagtaacctcatgtacatgactctcatgtcaaataatgaaaaggatcatttaatttcctttgttaatatctgaaaaggattaagaaatatattattctatatgtaaataggaaaaaaaatcccttattatttcagtatagccagaaaattatttggtagttctcggaaactggctgcccagataataactaccattataactggtcgttgcagtagccctttctgtgcatagtaccataaagagccttacaagattgccttatgggaagataggtcaaggtttttgacttcttccctgcccatgattatctctgctttccaaaattcattaatagttttcaaccactggtctattatccccaagcattattttgggagagtggagacttacagtttcagaatcttgctcaagctcttaactgcaacagtggtaataataatcatttattgaattccacaatagaagctagacttttacgtttattttctctaatcctcacagttatctggccaggtaagtgatatatcttcactctactgatgagggtacgaaggccctagatgacataaggcaagttttttaccagaaaagttaaggctgtggtactgggatttgaattttctgtttgacttcaaagccttttgtttttactatacacctcttaaatatttacagctgtgtgtgtgtgtgtatgtgtgtgcatgtatgaatttatgtttatatacttaaaaaaaatttttttttgagacggaatctcgctctgttgcccgggctggagtgcagtggcgcgatctcggctcactgcaaccttcgcctcccaggttcaagcgattctcctgcctcagcctcctgagtagctgggattataggcgcctgccaccacccctggctaatttttgtgtttttagtagagatggagtttcaccatattggccaggctgttctcaaactcctgaccttgtgatctgcctgcttcagcctcccaaagtgctgggattacaggtttgagccactgcacccggcctatgtttatatactttttaaagtaaatgatttgtggataaacctgatttttttccctcctaccatcttagtatctaatgcttttaaaggagcttcctggagaagagtaccccttgccaatggaagatgttcttgaacttctgaaaccactatcgtaagaaattaaaaccttatgttatgttcactttaaagttataaaataactgatgtgttctgttaagcttataaagttgaactttttttttttttttaccacagcaatgtgtgttctttgtatcgtcgtgaccaagatgtttgtaaaactattttaaaccatgtccttcatgtagtgaaaaacctaggtcaaagcaatatggactctgagaacacaagggatgctcaaggacagtttcttacagtaattggagcattttggtaggtacagtctattttgtggtcctatttttcttttgctatctgtggatacgaatgcaagttttgtatccacatcagtgatttcttctgatcttcctacatagctaatacatcttttaagaatagcagaatgtaatttgtgtttccctcagtcgcttgaagaactacattgctttttgtttaaggcttggctttctaaaccgtttaactcatttctctgcaaattttgaatcacttaataatttgacatgtatagtgaataaaggataacaagccaaaatcagttgaattgttcatgttccctaagtgaacaaattggccttgtccttatctggttattttatgcatattgtcacattccaagataacaccctgatacttacagaggagcacatacatataatttagaacccttgtactatctgattgctaagtaattctaaatcaatagactgttttttgtttttgtgtttttttgagatgaagtctcactccatcacccaggctgcaggctggagtgcagtggtgctatatctgctcactgcaacctccgcctagtaggttcaagcaattgtcctgcctcagcctcctgagcagctatgattacaggctcccaccacaatgcctggctaatttttttgtatttttagtagagatggggtttcaacacgttggccaggctggtcccaaactcctgacctcaagtgatctgcccaccttggcctcccaaagtgttgggattacaggtgtgagccagtgcacccagcctgaatgtggttttgaaatcttcaatataccaaacaaagaaatcttcaatataccaaacaaagaaatttctttctaaagtaagtttactgtaatgtagtttagccattctatggtagcccccaaaaaaggacataatggtataaaacaaataatatacgctaaaatgaattcttttacactaatttcttttagcttgaatttttggcaaggtgagtatgttggcatattccacataatgacaaataagtttagcacagaaagacatattggaagtaacttataataacctttcagtgagttttctgagtgcttttatcagaatgattatttaactttggaaaacttacttgatttcaggcatctaacaaaggagaggaaatatatattctctgtaagaatggccctagtaaattgccttaaaactttgcttgaggtgagtttttgcatttttttagtaagatctccattgaaaattttaaagcagtctttgtttgttaatgagtaatttttctctatttcatatttaaccacagttcttttcccgtaggctgatccttattcaaaatgggccattcttaatgtaatgggaaaagactttcctgtaaatgaagtatttacacaatttcttgctgacaatcatcaccaagttcgcatgttggctgcagagtcaatcaataggtaatgggtcaaatattcatgaagtatttggaatgctgcagatggcagtagaatgtcttacatagtaacagctcacagttgcaatattaaaaatagctaacacttgttgagtatatacggtgtgcctggcatttatgtttattcttaattcttatacttctgtcacttagattctattatttccttcaatttataaatgaaaactgtgacttagtgaggtaaagtaacttgcttatgccacagagctaacaagtggttgactcgagtgaggtgtgtctactatcatgtacaggagatacggactgtttggaaattactgtgattttatgtgagtttatgaaatgataattagcacattttacattgtgctaattacaattatatttacttgagtgaacatccagtgaagcactggaaggattctatcatgaggatctttatatttgagtactggaataaacatatattaatttcattctttttttttttttttttttttttttttgagatggagtttcgctcatgtctcccaggctggagtgcaatggtgtgatctcggttcacttcagcctctacctcctcggttcaagcaattctcctgcctcatcctcctgagtagctgggattacaggcgcctgccaccatgcccagctaatttttttatttttcgtagagatggagtttcaccatgttggccaggctggtcttgaactcctgacctcaggtgatccacccaccttgtcctcccaaagtgctgagattacaggcgtgagcctttaatcatgtagtttttgtcattcgttctgtttatgtgatggattatgtttattgatttgtgtatgctgaatcagccttgcgtcccagggatgaagctgacttgatagtggtggataagcgttttgatgtgctggattcagtttgccagtattttatcgaggattttcacatcgatgttcatcacggataatggcctgaaattttctttttcttgtgtctctgccaggttttggaatcaggatgatgctggcatcataaaatgagttagggaagagtccctctttttctattgtttggaatagtttcagaaggaatggtaccagctcctctttgtacccctggtagaattcggctgtgaatccctctggtcctgggctttttttggttggtaggctattaattactgcctcaatttcagaacttgttattggtctattcagggattcgacttcttcctgctttagttgggaggttgtatgtgtctaggaatttatcactttcttctagattttctagtttatttgcatagaggtatttatagtattctctgatggtagtttgtatttctgtgggatcagtggtattatcctctttatcattttttattgagtctatttgattcttctctctttattagtcttgctagcggtctgttttgttaatcttttcaaaaaatcagctcctggattaattgatttttttgaaaggttttttttgtgtgtgtgtgtctctatctccttcactcagctctgatcttagttatttcttgtcttctgctagcttttgaatttgtttgctcttgcttctctagttcttttaattgtgatgttagggtgttgattttagatctttcccactttgtcctgtgggcatttagtgctataaatttccctctaaacactgctttagctgtgtcccagagattctggtacattgtgtctttgttcttattggtttcaaagaacttacttatttctgccttcatttcattatttacctagtagtcattcaggagcaggttgttcagtttccatgtagttgtgtggttttgagtgagtttcttaatcctcagttctaatttgattgcactgtgatctgagagactgttacgatttccattcttttgcatttgctgaggtttgttttactttcaattatgtggtcagttttagaataagtgtgatgtggtgctgagaagaatgtatattactctgttgatttggggtggagagttctgtagatgtctgttaggtctgcttggtccagagttcggttcaagtcctgaatatccttgttaattttctgtctcattgatctgtctaatattgatggtggggtgttaaagtctcccgctattattgtgtggaagtctaagtctcttcgtaggtctaagaacttgctttatgaatctgggtgctcctgtattgggtgcatatatatttaggatagttagcacttcttgttgcattgatccttataccatcatgtaatgtccttctttgtctttcttgatctttgttggatgtttgttttatcagagactaggattgcaacccttgctttttttctttctatttgcttggtaaatattcctccacccctttattttgagcctatgtgtgtctttgcatgtgagatgggtcccctgaatacagcacactgatgggtcttgactctttatccaatttgccagtctctgtcttttaactgggacattttagcccatttacatttaaggttaatattgttatgtgtgaatttgatcctgtcattatgatgctaactggttattttgcccattagttgatgcagtttcttcatagtgtcaatggtctttacaatttggtatgtttttgcagtggctggtaccagctttgcctttccatatttagtgctaccttcaggagctcttgtaaggcaggcctggtggtgacaaaatctctcagcatttgcttgtctataaaggattttatttctcctttggttatgaagcttagtttggctggatatgaaattctgggttgaaaattattttctttaagagtgttgaatattggcccccactctcttctggcttgtaaggtttctgccgagagatctgctgttaagtctgatgggcttccctttgtgggtaacccgacctttctctctggctgcccttaacattttttcattcatttcaaccttggtgaatctgatgattatgtgtcttggggttgctcttctagaggagtatctttgtggtggtctctgtatttcctgaatttgaatgttggcctgtctcgctagattggggaagttctgataatatcctgaagggtgtttccaacttggttccattctccccatcactttcaggtacaccagacaaacgtagatttagtcttttcatatagtcccatatttcttggaggctttgtttgttccttttcattcttttttctctaatcttgtcttcatgctttatttcattaagttgatcttcaatctctgatatcctttcttctgcttaatcagttcggctgttgatacttgcgtatgcttcacgatgttctcatcctgcatttttcagctccatcaggtcatttatgttcttctctacactgattattctagttagcagttcctctaaccttttttcaaggttcttagcttccttgcattgggttagaacatgctcctttagctcagaggagtttgttattacccatcttccgaagcctacttctgtcaattcgtcaaactcattctccgtccagttttgttcccttgctggtgaagaattgtgatcctttgcagcagaagaggcattctggtttttggaattttcagcccttttgcgctggtttttcctcatcttcgtggatttatctacctttggtctttgatgttggtgacttttgtatggggtttctgtgtggacatcctttttgttgatgttgatgctattcctttttgtttgttagttttcctttttacagtcaggcccctctgctgcagatctgctggagtttgctggaggtccactccagaccctgtttgcctgggtatcatccatggaggctgcagaacagcaaagattgctgcctgttccttcctctgggaaggttcgtcccagagcggcacccgccagatggcagcgggagctcttctgtatgaggtgtctgtcgacccctgctgggaggtgtctcccagtcaggaggcacgggggtcagggacccacttgaggaggcagtctgtcccttagcagagctcgagcgctgtgctgggagatccgctattctcttcagagctggcaggcaggaacgtttaagtccgctgaagctgtgcccacaaccacccctttccccaggtgctctgtgtcagggagatgggaattttatctataagctcctgactggggctgctgcctgtctttcagagataccctgcccagagaggaggaatctagagaggcagtctggctacagtggctttgtggcactatgttgggctccacccagttcgaacttcctactggctgtgtttatactgtgaggggaaaacatcctactgaagcctcagtaattgcagacgcccctccccccaccaagcttcagtgtcccaggtcgacttcagactgttctgctggcagcgagaatttcaagccagtggatcttaacttgctggtctccatgggggtgggatccgctgagctagaccacttggctccctggcttcagccccctttccaggggagtgaatgggtccgtctcgctggcgttccaggtgccactggggtatgaaaaaacactcttgcagctagctcagtgtctgcccaaatggccgcccagctttgtgctttaaacccagggccctggtggtgtaggcacccaagggaatctcttggtctgcgggttgcaaagaccgcgggaaaagcgtagtatctgggcaggaatccaccattcctcacagcatagcccctcacagcatagcccctcacggcttcccttggctaggggagggagttccccgaccccttgtgcttcccgggtgaggctacaccccaccctgctttgactctccctccgtgggctgcacccactgtctaaccagtcccaatgagatgagccatctacctcagttggaaatgcagaaatcaccaccttctgcgttgatctcactgggagctgcagaccagaactgttcctatgttgccatcttgctgttcccttgttttatttttctctagtatttatgataacgtgaaacatattttaatatatttacttctccgtattccactagtatatatgttcctaaaggcactggtttttgtctgttctgttcattgttgtatttttagcacctaaaacaatacttggcatgtgataggtatccaataactgttttaaaataaatgaatgtacttgaaaaaaaattacatgatgcttcaaaaacatcaaagctgaaaatcatttgagtaactttaaaatgtaagcgatcaataataaaagattactatattgttcagcagtcacataaagtattaaaactaatatttcagtatttgaatatgccgacagtaatgttttcataaactagattttgtgtctaactcctcaggtttggaactgtttttagtaagaccataatgcattgcaaggatttctaatgaatatgtttagtagttcaagcccttattaaatttcacagataaaagcaaatgtatgctgaactttaaggactgaggtaatataagactgaattgaatgtaataaggcggcagtgtagtggtggcattaaaaaaactgaagattcaaaaagtataaattcaagaataacatgcaagtagcattcttttttttaattttacacttgttagattttgtcttagtccctttgtgttgctataaaggaatacctgaggctggatatttacaaagaaaagaggtttatttggcatatggcgtctacatctggtaagggcctcagactcatggcagaaggcaaagaggaatcagtgtgtgcagagatcacatggtgagagaggaagcaagggtggaggcggggaaggccatgccaggctcttttttttaataaccagcccttgtgggaactgaatagtgagaactcactcattccttaccctcaggccttaatctattcgtgagggatctgcccccatgactccgacacctcccattaggcataacctaatggggatcagatttcaacatgacatttggaggggttaaacattcagacaatagcagatatctaatgttcagctattttaagagcagtgagtgaaactagaagaatcagaggaacataaacaattataaaagcttcgattactaaaaaaggataaaagacaaagttgattaaagagttatccttaaatatgtgggtgttacgcaaaaggtgtactgatcaacttttttccatcacataaaacaaaatttaaatggtacataaaaacattaacttacccgctttcagagtgattaaatgttagagcaggttgacattggaatctgtggactcaactaattggtgttcggccagagaacagtttatcttttctggctagtttgagttcagtgctgttcaaatttgagcaatagttaaaatatattttgagaccctcttcagttctaggagaaaatagattttgtattcaagaccttaatactaagctgctggtctgaacctctttaaataaactcaggttttgttagtctttaagaaagagctagtatgttattatgtctcacagagtgatttatttttgttctggaatatgctttggaaagtagggtttgaaattagaaaattatttcactttttgtttgtttgtttgcttgcttgttttaagattgttccaggacacgaagggagattcttccaggttactgaaagcacttcctttgaagcttcagcaaacagcttttgaaaatgcatacttgaaagctcaggaaggaatgagagaaatggtaattttaagtaacatgtatttgctgttatcatatgcttgctatgaatatcccataaattacttcaccaagtttggtataagagagtttataatccagtagtttacagtataaagctgctctaaaacaactgtatgaattgattgaaactgcattctttctgggtcacaatgggtcaaatcatagcaatttcttttggtttagcatttttatggagaaacccaaaatttaactgagtttttatgggagtataaatggctcccttttttacctgaaaaatccttttatatgtgatctgattaaaagctaattaagggaacaggtgacaatgggaagaaatggattgaggagaagaatctcacacaaaatcaaatcattgtggtgtttacagtgaaacttgtgatatttcacgtttctgtagaataatatattttttatggtaatgattatcttagagttcaaattttttcatttatttatgccctggtttgtttcttacaagtatttaaggtagttaaataactgtcaagtctgtgatagcaggaaattgaaaggaacaattgaaagaatgtgagtttagaaaagaatttcaatagattagaaagataagtgtaaataacataaaatctaatgagataatgtatattatacattttaaatcagcctgtcatctgcaaaaagggaaaatactgatctgacagcaattcatttagaaaaagacctaggaagttttgtatcttgtgattatagtatgaatcaacattgtattacagttaccaaaaaggctaactctgtcttacactgcattaatagaagcatattgtcatgaacaaagttaatacaagaacttggatcttttatactttttgctttatttttagatcttttaatttttatgggtacatagtaggggtgtgtgtgtgtgtgtgaaacgggtatacaatgtgaaataatcacatcatggagaatggggtatccatcccccaaacaaatatcctttgtgttacaagcaatccaattacactgttttagttattaaatgtttctgtattttttagaggataactataatgtttggtttggttctgagtaaagtaaaagatttttagccagaatgttatagatctgtgtcttataaaaaatggatgaaggaattgacttagtggaaagctcacatttgtttttaaacatgtcagtgcttgtgatttagcaaaggtattggtccttactctttcttgtaccaaaagacagaactaggattagtgagtaggaggtttctgaaatgtgtatagcttgtcaaaaaatctggagttcagttgggattttataattgattgttaaacatttacattttacattacattttttttttaatttctttttaagtcccatagtgctgagaaccctgaaactttggatgaaatttataatagaaaatctgttttactgacgttgatagctgtggttttatcctgtagccctatctgcgaaaaacaggctttgtttgccctgtgtaaatctgtgaaagagaatggattagaacctcaccttgtgaaaaaggtatatatggatgagtattttattagaagcttccttaggtcactgtgaaataatttaaaaagttaaagctagattttctgagtggcacttatttaagactaggaaacaattttattttttaggttgggaatattggaaagcagttatacaaaaactattcaaatggtatatttatggtatgcactgtttcttacattccatttaagagcatttcacaaggctttcattgtactaacaagagtgaatgacttgtccaccagactgaccaggcttttggaaatagtatttattgagggaaacacatggagacaagagcagcataggtgttttgcccggtagattctggggcagcacattgggatccagcagggccagaagtcaaattttagagctatcaggcttttaagttcagttatcaggggagaaggactagggtccaagccttataattactacatcagcacagtattatagaatgttggccccgtctcttttccatcacctcagcatttatggtttaggaagttccagacctttccattgcaaatttttatgtgataaatcagtggtaagtcagtggactgatattatgccagttaacattctaccagcatagtttccatggtgctttggagtaagccagcctataatcagttagccttttacctctcagtataagacttgttcggtgtttcttaaaagtatacaaatacattacctaataatcataagtgttatgtattgtttggatttttcttatttggatttaagcctaagagaaataattttactttatatttatttatttattttgaaagacagggtctcactctgtcacccaagctggagtgcggtgatgtgatcatggctcactgcagtcttgacctcctgggctcaagcgatcctcccaagcctcctgagtagctgggactacaggcatgtgccaccacacctggctaattttttttttttttttgagacggagtctcgctctgtcgcccagactggagtgcagtggcatgatctcggctcactgcaagctccgcctcctgggttcatgccattctcctgcctcagcctcccgagtagctgggactacaggcgcccgtcgtcacatccacacacctggctaatttattatacagacgggctcttgctatgttgcccaagctggtcttgaactcttgggcttaagcaaccctccctcctcagactcccaaagcgttgggattacaggtgtgaaccaccactggccagtaattttacattaaatcttcctttaagtataaccaaatgttggaaactcttagcatatttttatatttttatttacttaacatttattaagggtttgctatgtgtcagatactgtgccagttgagtacattttcttaattattattcccatctcatagatgaggaaatcaagaaaagttgaatgaatgttgtttctaggtcctactctaaataatattaacaagcatttaaatgatttatttttttcatttttcttaacacattgactttttggttcgtgcaggttttagagaaagtttctgaaacttttggatatagacgtttagaagactttatggcatctcatttagattatctggttttggaatggctaaatcttcaagatactgaatacaacttatcttcttttccttttattttattaaactacacaaatattgaggatttctataggtaagtttatacatgacatatgtgaaatttgtttaatttaaaattagttaacaatacttagcaagtcccctcaccagcaacacacataccatacccatacacatgtgtgtgtgggagcctacatagtatgagaagcaggacagcttcttttaataagaatgtattgaagggagtcactggacttcagatctggtcctagctgtgccaacaaccagctatctgactttggtcaaaccacataaagaccctctatgccttggttttttaatatgtaaagtaagcaagttacacaaggagatctttcaggtccttttcagctttaatatttgatcatctttcctttggaaaaaattgaagataaattactagtagctggttatttctgccttgtttttcttttctgttgcttgactataggcctcttagttattacttctattagatttagaaacttaatgtaaaactttattttgctaactttaactctgtacaagaaaaatttgaaaatggagaggtttgaaacaactaaaaagtaatgtttaggtatcaggatgatgggaaggcatctcatatttgttgaacatgctctgtgttatggactttgctatgcattttacatgtagtgtatcacagatctgagtttcagacttatcctaatagagttttctaatagattatgagttgtatgtaggtagtttcctttaagaaggatattcctacaaaagtaaatttagtggtccttatagttcattcattttggcaagaacaatatagctatatctctgtatatgcgagggattcattccaggatcccccatgtatgcctaaatttacgcgtactcaagtcaccaagttggccctgcagaacccacgtatatgaaaagtcagtcctctgtatatacagactttcacatcctgtgaatactgtttttctatctgcatttggttgaaaaatatgcaagtataagttcaaacccatgtttttcaagggtcaactgcatttatgttagttgattatgcagaagaaataaatataaattcaagtctccatttttatttgtttattgttttgttttttctttttgctaagggtgctactgaacaaggtcccatttttaaatcccataattatggtggtggtatgttctaagctttctaatttttttaatgtgactatttagaatttacttaatttttccatttataaaattaaagaatgtttaataatctggataaagtatgatactttaatgctgatggtattaaaacagtttttaagaactattttataaaattttacttggaaaagttatatataacctgtattttaaatttttctatttttagatcttgttataaggttttgattccacatctggtgattagaagtcattttgatgaggtgaagtccattgctaatcagattcaagaggactggaaaagtcttctaacagactgctttccaaagattcttgtaaatattcttccttattttgcctatgagggtaccagagacagtgggatggcacagcaaagagagactgctaccaaggtctatgatatgcttaaaagtgaaaacttattgggaaaacaggtatggcttcaatttttatgtacttttcattccctgaatgatatgagatataacctttaagttttaaggctatttattcgatttattcgtatttatatattgaaacttagcttgtggtaatcattatctagcatagccaacccatgaatttttttggttatgtcgtgttgtctccctctgattggcttttaactaaatagaaatgttttaaattagaaataatccaaaaaaccatttgaataattttcttctgccatttaaaaatttattttaactgttgtaatacacgaatgcaaactggttgttaaagtcaaggaatactaaacagtgtacagaaaaccttcactccctcttcaatctcaccaagctttccacttttcaagaaaaacaaccgtccctcattcctatagttctcataccctgctgtttgtttttttgtgacacttattaccttctaatgtatgatacaatttaccttttttttctgtctttgcttttgtttttgagacagagtcttactcttttgccaagactggagtgcagtggcatgatctcagttcactgaagcctctgtctcctgggttcaagcaattctcctgcctcagccacccaagtagctgggactacagctgcgcaccaccacacccagctaattttcatatttttagtagagacggggtttcaccatgttggccaggctggtctttaactcttgacctcaggtgatcttcccacctcagcctcccaaagtgctgggattacagatgtaagccaccttgccagaccataatttacttttgaattatgtttattatttaccagtcttctccagtatacatttttctctcttttttttttttggctgatgtatctctaatatattttgagtattcattaaatgtttgtcaaaagaaggagtcaagtaaggaaggatttaaaaagcttcgtttgttttataatcatttatatacatttccaaaattttttgaagcaacttatattaaaacatacatacaaattttttaagataaaaaagctgtggtcaccccacatttatgtatgtatttatttattttggatataagtaagggataagtaaccaaacttggtcaatattagataaacttcaagggaccttttttttttttagtttcctagttatctatattgaaccaagaaatggaacagcaagttccttagttgcttaggtggacctattcagaactggttgtaagtctgcagtctgaagggaaatggtgagcagaggactcatttcccaaagacagctggaacagaaataggcactccagaggttatggaatttgagagagatactcagcctctagccactcccattcaatctcccagcttagtcttctgagcattcttaatcttactattcttttcttaatgtattcaaaccaaaagacagcaatttttagagcctgaataggttttggagggaaaagtaattacgttcaacttcgattgaaactcttgcctcaagaatgaagaacagcaaaaattaaatcacagtttcttagctttttggttaaagatgtaagttaaattcttggccgggtgcggtggctaacgcctgtaatcccagcactttgggaggccaaggcgggtggatcacctgagatcaggagttcaagaccaacctggccaacatggtgaaaccccatctctactgggtgtggtggtgtgtgcctgtaatcccagctgtttgggaagctgagtcaggagaatcacttgaacccgggaggtggaggttgcagtgagccaagattgtaccactgcattccagcctgggcaacagagcaatatttcgtctcaaaaaaaaaaaaaaaaaaaaaaaagaattgtataaaacacacaaacaaagcaaggaaagaatgaagcaacaaagccagagatttactgaaaatgaaattatactccacagagtgggagtgggccctgagcaagtggctcaagggcctggttacagaattttctggggtttaaatacccttcagaggttttccattggttacttggtatacaccctatgtaaatgaagtagtggtctgtaatcagtctgattggttataggaggggaccaatcagaggtactttcaatttcttatctgccacagtaaaagggagggggttgcaaagggagtagcctcttgtccttttgttacttgagcatggaaagttggggttttccttttgatttcgttctaggaggtcagcatggattgaccttaggttccctgcctccagaccttattgccctgcctcatttacgttaggtttctttcttgtcaccttctaaaatattttttgttattaggaagtatgtttttgaacttccttatgcattaagtaaattagccatttatcactgtaattccttatttggaaagttgttatattcacccttaagacttcacaattctcattcatttaactaaagtgcaacatagcagacttattctttatatttagagaatttgtgtcttttgtgaagctacctgtctatagtgggaagtagattaatgaaaagtccaaatctgttggggagggttttattctactattgatgaaaggggatgtggatcgcagctagccttagaatttgggatggcactcaagtagaagtctgggaagaagttacgcagggaacaaagatgacattgttcgcagtccctgggaattcttaacagtaaagttctgtaattgagacagaattcccaaataaagtcaagagtaaaattcagatagaggagcagttatacatcagtgggaaatttggttggcagaaaaattaccaggtcatacaacttaatgatagacctgaagtcttatttaaaatgattctctaaaattgaagaattggattaagggggccttgtttggctgattttcatactttttcctctcagtctacaggttggctgcatagaagaaaaaggtagagttatttataatcttgtaaatcttggactttgagtcatctattttcttttacagtcatcgaatacttttggaaataaggtaatatatgccttttgagctgtcttgacgttcacagatataaaatattaaatatattttaattttgtgcccttgcagattgatcacttattcattagtaatttaccagagattgtggtggagttattgatgacgttacatgagccagcaaattctagtgccagtcagagcactgacctctgtgacttttcagggtatgtacattttaaacttagagaactagctctaacttcacaagtttttaaagaagtttattggttgacaccttcaatgtctatttcaatttatagacatcactctttttaaaaaattttctttaaaaatagccacctttgaattgaggtaattacctatcctcttttaccatagtctccccacagtaattactctttctaaattgaccacttggttggccaacccaataaccttttcttagtctttctgtaatatttgaacattgtgccatctgttggcccttgaaatttttttcttcatacacattattcctagttctcttctctttatctaggtcttgcctttctagatcaccttttctttttttttttgagatggagtctcactctgttgccctggctggagtgcagtggcataatctcggctcactgcaacctctgtcttccaggctcaagctatccttccttccacctcagcctctcgagtagctgggacgacagatgcacatcactgcgcctggctaattttttatatttttggtagagacggggtttcactgtgttgcccaggctggtcttgaacttctggcctcgaatgattcccccgtgttggccaaccaaagtgctgggtctacaggcatgagccgccgtacccagcctcaccttttctttattgtgcgttattatctgtacaatttaatttggatgtgaatgtctctgagttgtatatgaacatcagagttgtttccctggcttgattgtaagctacttgaaaatatgctttactttttttttttttttttttaatgtgccctactgtgctgggcatataaaatagtaataatatctgagaaagtactttcacatatgtaatttcatgctgtctaaataagtgttgattgccatgtcttaaaatactgcttttacagtactggcatagagctttgattctgatctgaagtaatactgaggctcatttattgaactgccttttaactttataagattttttaagaaaatcattataagatcatttaagattatttaagttactgagggtgaaaggtatttagataatctgatttatatatctggactgtgatatgtcatttgtgattttattgaaagtatagtttttcagtagaaaaatggtttttgaatttgggggttattaaaatctaaattttcattttggaagttcactggtctatgaacaaaactttttaaaacgatgactgtattttttcccttaactctgttagggatttggatcctgctcctaatccacctcattttccatcgcatgtgattaaagcaacatttgcctatatcagcaattgtcataaaaccaagttaaaaagcattttagaaattctttccaaaagccctgtaagtatacatgatgagtttaataatagaacattccttcttttttagctaaaaaaactttgtaaatacatcttaaagaggaaaagtaaacaaatgaaaaatttatctcataattaaaaaggaaaacattcatttacaagtttaaatggtattttacttgtcagcattaattgaaatatgttacatatgagaacagaatcttgtgacactttagtgatatattagctcagggaatatatctactttttcataggaatatactatttaattgtagtttactttctgaaaattaaataaattggcaatagtttaagatagtaattttcttaatgtaacattttgtacttgatatcaaacccaaatctaaattctgttatttagttattttaaatataaaatgtgtaggtattcaaatatttgaagaaaaaatataaagtgtatttattgtagccgagtatctaattaaacaagtttttactaaatctgtttattttctaggattcctatcagaaaattcttcttgccatatgtgagcaagcagctgaaacaaataatgtttataagaagcacagaattcttaaaatatatcacctgtttgttagtttattactgaaagatataaaaagtggcttaggaggagcttgggcctttgttcttcgagacgttatttatactttgattcactatatcaaccaaaggtaaataacatatttagaccaatatataagcagtctttctatcctgttcttcctgtttttttgctttgttttgttttgttttgagacaaagactcactctgtccgcccaggctgggtgcagtcacggctcactgcatcctcaacctcctgggttcagattatccttcctcctcaccctgccgggtagctggggctacaggagcataccaccatgcctgactaattttttgtgttttttgtagaggtggggtttcaccatattgcccagggtggtctcaaactcctgggctcaagcgaactgtcagcctcagcctcccagtgtgctgggattacaggcatgagctactatgcccaacctatcctgttcttttaattgaaagtttatatgcttctaagaggtagataccagaatgttgctttctgaattttgctttttaagatgtctattatatttacttattagtttttaaaaattgcgctacttgcctgggaaacatagcagacctcgtttctactaaaaattttttaaaaaagaaaattagggcaaggtgtggtagctcacacctataatcccagcactttgggaggttgaggtaggtagattgcttgagcccaggagttagagaccagcctgggcaacatgatgtgaaaacccatctctacaaaaatttttaaaaaaataagccagggattgtggcatgcacctgtagtctcacctactccggaggctgaggtgggaggatggcttgcgctcaggaggcagaggttacaggttacagtgagcaaagattgtgccactacactccagcctgggagacagagcgagactcttgtctcaaaaaaaaaaaaaaaaaaaagaaaaaagaaaattatccaagtatgatgatatgcgcctgtagttctagctacttaggaggctgaggtaggaggatggcttgagctcaagagtttgaggctgccagtgagccttgattgcaccactgcattcatgcctgggcaacagagtgagactttcactcaattaaaaaaaaaaaaaaaagcactacttctccaattctagaaatcttaagaaggatcttcaacattttaatactaatattctagctattgatggcctcaaataaatgttactatagaattggggttgttcggccgggtgtagtggctcacgcctgtaatcccagcactttgggaggctgaggcgggtggatcacaaggtcaggagatcgagaccatcctggctaacacagtgaaaccccgtgtctactaaaaatacaaaaaaattagccaggtgtggtggcaggtgcctgtagtcccagctactcaggaggctgaggcaggaaaatggccagaaccaggtaggcagatcttgcagtgagtctaattcgcaccactgcactccagcctgggcgacagagcaagactccgtctcaagaaaagaaagaaaaaacaaaaacaaaacaagaattggggttgttcaatttagcatctctgatcttttccattgattttaatgagatttctattttttaaggtcttttttattgtggtaaactatataacataaaattttttattttcgccattaaatggccagttcagtagcatcaattacatttccattgttgtgcaaccatcaccactgtctatgtccaaactttcattatctcaaactgaacctctctactcattccacaataactccacattcctcctccccactggccattgagaaactaatctattttctgtctcaatgaatttgcctattgtagatattttaatctagagttgtacaatatatgtccttttgtgtcttgccttgtgtggtcactgaaaactttgtaccttagcttgtgtttagatagtgtttgatagagatttccttggataccaagagtgttgggatgaggaagcatgagaggagaaaacttttcctagtgtttgcagattggctttatgctaggattcttcttcaacacttagccatgcttgcattgcttgggatcagccccaaatacaagcttagggtcttctctggtcttttctgagcaagagtcttatcttgagcatgtgtgtggctttctgaattccccctaatttgtgggtgcttttgaatatactaatttcccaaagaaatacgctccccagctactcctaggctttaggcagcctcttgtatgtctcaacagtaatcttttgccctatgcacctgcaggttgttggtctgccttacaaagtttcaagcaacacccatatcttttgtagctggtatgaagttaaacaaaacagagctacgcactttacatcagtccttggttccagacaggttagaatagacatatacaatagtttgcaactaatctacttagctccatgaactaccatgagccagtgtctcacaccgaggatataggccactgcttttgtgattgttgccacgctggggtaggggtgggcaaggacaagtaaagttaccacaaagctttcctgctgtttttcagttggatttttcttgattcaatattttcctgattactgtaaacctttgactattttacagaattctaacaaaattagttctgacaattttgcctgtttttcaatgtttctattaaaggatggaagcttagagctgcctattctgcattttgctgatgtgacttctctttttggcttataagccattaaaatatttatgtcaaggcatataagaattagagatgctgaacaaaaggacttctgaatgaatttatttcagagtaattttccagaacttactggttgttgttgtttttttttctccctatattaggccttcttgtatcatggatgtgtcattacgtagcttctccctttgttgtgacttattaagtcaggtttgccagacagccgtgacttactgtaaggatgctctagaaaaccatcttcatgttattgttggtacacttataccccttgtgtatgagcaggtggaggttcagaaacaggtaattttctgactcatcttcaaaatggtatttaaaatatataaagtattgttagaaggatttgagtgttttatgtttatttggtataattggtgattttattgagaatattttttgtaaaatgattggaaaaatattcttaatgaattaacctttgtaatcaattacagagcacttggtacttttgatagttttatctactgtgctgaagtggagaggtagtcaaaactagggatagcagttcgcaacgttatggtggtatttgagttactacttatataaactgtttcattaatattggcattttttttaacctcagtacccatcttgtagtagtaccttacatagttattgaattatttgaaaacacagaaactaaaagctgggtatcttagacgtaattagaacatttaatctgatctaggttaatagattttatcatttattacagtaagttttgttggcttactttaaaattatttctctccttataattttttctttttaaattatatttaggtattggacttgttgaaatacttagtgatagataacaaggataatgaaaacctctatatcacgattaagcttttagatccttttcctgaccatgttgtttttaaggatttgcgtattactcagcaaaaaatcaaatacagtagaggacccttttcactcttggaggtaataaaaatttcatcatctactattttttattagagaacatagtagtacttttcaaaaatctgtaatgctctagcagtaaaaaatggaatcttttctttaattgtgattaaaaatatatacgtaggccaggcacattggctcatgcctataatctcagcactttgggaggctgaggcaggaggattgcctgagcccaggagttcaagaccagcctgggcaacatggcgaaaccccgtctctacaaaaaattagtcgggcatggtgatatgtgcttgtagaatcagctactcaggtagctgagatggaaggatcacctgagccctggaggtcaaggctgcaataagccaagattgctccactgcattccagcctggatgacagagtgagaccctgtctcaaaaaaaaaaaaaaatatatatatatatatatatatatatatgtgtgtgtgtatataaacacatacttgtgtgtgtgtaacgtgagatctacctacttaagaaataaaaaaatgaatcttaatgtatctctttgcattgaagccaaagtataaataacaaaacttcctggtaaagatccaaattgtaagttttcaaggaatgtgatgtaaaatagttttgattttaacacataagatcctaaggtccactgatagctcaaaactaccaatggatcttttcaatgtcaatttaatgtttgtgttagagataacgtttaacttttgaaagcatattttaagttttaatctttataaacctcgaaattatgtttaggtatattcttccatacatatcttaattataatttttaaatgatagtctgtatttgactctatgtaaatataaaaacgtatttaagtatgttaagatgtgaagttatactactaaagagaaatttaagcatttccttccagttgagtatgctataacaatcttgaagtctgtgttaccatgagagagtctattagaatttaaaggattaggctgggtgcagtggctcacgcctgtaatcccagcgctttggaaggctaaggcgggcagatcatctgaggtcaggagttcgagaccagcctggccaacatggcaaaaccccatctctactaaaaatacaaaattagctgggcgtggtggcacattcctgtaaatgccaccttttcaggaggctgagacattagaatcacttgaaccggggaggcggaggtaagagtgagccttgatagcgccactgcactctagccttggtgacagagcgagactctgtctaaaaaagagtattaaaacattgtagggtttgcagtggaagaaatcatttatttcttccttgattagtagtaatagagacatgagtcagtgtctataaatggcacttaactaatttttttcttttattaagttttatttcacaggcttaaccaatacgtgttaaaagcaagttacattttctcttttaggaaattaaccattttctctcagtaagtgtttatgatgcacttccattgacaagacttgaaggactaaaggatcttcgaagacaactggaactacataaagatcagatggtggacattatgagagcttctcagggtgctaattttaaatgacatgggctatttctacctgtttctttttgaaagaatattttgcaaagtcttgctcttggtttcattgtcacagacttagttcagactctcatcatttagttcagaccctcatttctcatctaactgtaaaactggtcctaactggtcttctcaccctgaactcttcctgttttattcatcctctgccagatgatttctctaaacccaaatatgatcatgtttttctactgcctaaattttttttttaagagacagagtttttttttttttttaagagtctcactctgtcacctaggctggagtgtagtggcaccatcataacttactatgaccttgaattcctgggtacaaggaattctcctgtctcagccttctgaatagctggaacaacaggcacacaccactacacctagctactttatttattttttttattttttgtagggacaggggtcccactatgttgcctaggttggtctcgaattcttggcctcaagtgatcctcctgccttagcctcacaaagcattgggattagaggtgtgagccacggcatctagccatgcttaaacatttttcatttctttttctttttttttaagacggagtttcgctcttgttgcccaggctggaatgcagtggcactatcttagctcactgcaacctccacctcctgagctcaaattctcgtgcctcagccttcctagtagctaggattacaggcacctgccaccatgcctggctaattttttgtattttttttagtagagacggggtttcaccatgttggccagggtggtctcaaactcctgagctcaggcaatccgcccacctcagcctcccaaagtgctgggattacaggcatgagccaccgcggctggcccatgcttaaacatttttaacaccttccaaccatgtaaaagaaaattttaattccttagagccagacatacaagttagtcttgtcttctagtccagtttacctgaatgaaagaaatatgtctcattttaatactttagtcatatgtgttatgtgtgtctatatatatgtaagtatgtatttgtaagtttttctagcttgcttgttaatttgatttgaaatgtacattattacagtatttgggaaactttctactttgtgttttgattttcatcttctataccaattaatttcatatttcttttttttttttgaaacgaagtctcactctgtcgcccaggttggagtgcagtggcacagtctcagctcactgcaacctccacctcctgggttcaagtgattctcctgccccagcctcccaaggagcagggattacaggtgtgtgccaccatgcccagctaattttttgtatctttagtagagacggggtttcaccatgttgtccaggctggtcttgaactcctgacctcaagtgatccatctgcctcggcctcccaaagtgctgggattacaggcgtgagccaccacgcctggcctaatttcatatttctcttgtgttgtttttactctcagtactttttaaaatgaattttagttttgactatctgagcatagagtttctaatacatttgagatatataaaatgtatgtaaatagaaacaccattatttcttgtacttgtgttcttgagtattttatgggctagagatctgccttgtgcattacagccactagccatttggctatttaaatgaagtaaaattaaatgaaatttgaagttcagttttttcattggtactgaacacatatcaagttctcagtagtacatttggtcagtagtgatcattggacagtgtagattatagacatttccatcattgcagaaagttctgtgggacagtgctggtctaaactctaaatgttagatgttaaaaagccaagcaggctcccaaagtcccttctagctttagtgttgaatgattcttgtgcttctgtttgtgattttgctaaggtgttgacttatctgcacaatttgtttaagacattttattttctctgttgtcacatattgctaatcactttcaaaagaatctgttgtattaaggaagttcagattcattccctacatattttttgagctactcatgacttaaaaccttttttaaactttatagaagttttctagtcagataatttaatatatatgcaattataaacaaaagtgttgtcttcatgctagtttaaactaatttttaaaaaattatttctagataatccgcaagatgggattatggtgaaactagttgtcaatttgttgcagttatccaagatggcaataaaccacactggtgaaaaagaagttctaggtaaactacagtcatgcgctgcgtgacatttcagtcaactgcggatcacatataggacagattataatactgtatttttactgtatgttttctgttgcctgtagtattcagtatagtaacatgctatacaggtttgtagcctaggtgtgtagtaggctataccatctaggtttgtgtaagtatattctgtgatgttcacgcaatgacagaattgcccaatgacacatttctcagaacatatctgtgtcattaagcaaagcatgattgtattggcggaatgaatgtgagttatgcggtggtcatctttattatatgagtggttatctttattatatcttcaaaataagtgagggtttgtcatttgggatattggggaaatatgagatgctagctaagttacatgcctatttaattaaaatgtccctaaaaaggccccttttgtacttttcttccttaaatattcatataaaatgaaaagttagagatttacatatgtgtataacttaatttgaaaatgccttgtaaatatttaggaaagtcagaaatacttgtttttagagttaagttgcaaataaattgactgccgatatattttataaatacattataactgacaggtactcagtgtcttttgttatgtagcagacataagaatgaagacttggagggctagattaaacttaaataattaaaaaccattcaagtcctttcctacagccatttgaggggaaacctaatgtaaaataagaagccgacatcatctctagtttaggtgtttagatttagtgaccacgggatggagaaatcacctggttaaagtcagcttgaagctctcgtgatggtttttgtttctaattagaaaaataggaataagtagtgtttcacagattctactatctttcttcaacagccttaacttctcattaggagcctaatatctacagtacttccttttttgtagattttaaaaaattgagatatatcctaatatagaaaagtatacagatcaaaaatatctagcttgaagaatgtttgcagagtacgcttgtacatgtagcacccagactaaaaaacagaatcttaccagaactgtagaagttttctttaaccaacatacttacctccttgtccatagtggcactgcttttatggacagacctgatttacaacagaagccctaagtggctttcctgtgtagcataaaattaatgtggtttgttctcacagctttccccctaagatcaggaatgagacaaggctgtccactttcactactgctgttcaacagtgtactggaagttctagccagagcaattaaacaagaaaaagaaattaaaagcatgccaattagaaaggaagtaaaactatctgtatttacagacgacatgatcttatgtatggaaaatcccagagaatccacaagaaagctactgtagtgctaataaatgaatttagcaaagttgcagggtacaagatcaacacataattagtggtgtttgtatatactagtagtgcacaatccagaaagaattagaaaagcaattccatttacgatagcatctaaaagaaataaatagccaggaataaatttaatcaaagaggtgaaaaacttatatacattctgtttgttagacgtgagtcactaagtacagaccacactcaacgggagggaagttaggctctaccctttgaaagaagggctctcaaaaaatttgtgaacatattttagtaaataccatcatgatggaaagagcacgaagagccctctgggttgctgaaaatgtcctgtcttcatctggttagggagaacacaggcagaaaaaaatgtgtatttgtatgtataaattttcattgaactgtgtgtttaagattatggaatttgtgtgatacctcaacaaaaattttaacagttttaaggttgattctctctctcttttttttttttcttttgtcacccaggctagagtgcagtggtgccatcttggctcactgcagcctccgcctcctgggttcaagtgattctcctgcctcagcctcctgagtagctgggattacgggcctgcgccaccacgcctggctaattttgtatttttagtaaagatggggctttaccatgttggccaggctggtctcgaactcctgacctcaggtgatccgcccacctctgtctcccaaagtgctgggattacagtcgtgagccaccgcactcggccttaaggttaattcttgaagtacagaaaaacagcattatagttttgaaattagaaaatttcagttttatgtatgatctcttacctatgactctactgaaatagaatttctatatgtagaggctgttggaagctgcttgggagaagtgggtcctatagatttctctaccatagctatacaacatagtaaagatgcatcttataccaaggcccttaagttatttgaagataaagaacttcagtggaccttcataatgctgacctacctgaataacacactggtagaagattggtgagtatttattgataccttatatgtaatctcaatatgacattcatggagaatgatacttcacacaaatagatattctcagtaactaaagctttgtccttttttaaatctcagtgtctttatgaaaattcttatatttttattaattcacataattatttaccctactatgtgccagacacttgatataatggtgaacattccagacaaggtccctgttaaaattttagtgggactagacaaataaacgataaataagaaaaatgccagatggttctacacagaaaattaagataggggaatataaagggagatgttttaggctcttgtcagtatcagaggtgccactctcctctaagcgaggccttattttgatccttttaaaataagtcgtaaagcagagaggttgttttataatcctagaagtcttaagctaatcagacagggtcttctattacttattctctgtgcaaagcagaattgcaccacatatcaaaatttcaactggttggttgagattacttttgcgtgcatgctctttctctctcttatttatttgttgattgattgattggtatctttgagtactccatcaccaccatatttgatggtagcctcaaagggttttcctcacaaccaggcacctttctaagataaatacgtgttttgatttttttctgtacttcccttcctccttctcttgaggaataaatgattggcaataatgtctaactgccatgtttccgttattgatttaatgtacctgtatatttctttcttttgttgttgtttttgtttcattaaacaaatttgtatggtttctttccaaacattttattataaaaagtttcaaacatacagcacaatggaaataattttatagtaaacacccatatgcttatcatatagtatctatattttatgctgtccttgcttaatcacttctagccatccgtctatccttgtgttaacatgtattaattcatctctctctttttttttttttttttttttgagacagggtctcgctctatcacccaggctggagcgcagtggcatgataatacatcatagatcatagctgactgtaaccccaaattcttgggctcaagcagtcctcctgcctcagcctcctaatgtgcaaagtttatgtgcttgagccacaccacactcagccagttcatctcattttttaaatgtatatcaaggtatatcaagcacagtttttgaagagagtgccacagaaaatttgcgagcattaaatgtttcattcatttcatagtaattcgaaattggtttttctgaaacagatgcacagaaatattagtgtgacttcaacttaagaatactaggaagcaggtacaagttttttgtatttttctttaacagggaaaaactttagatcttcaagggactttagcatatgaagatgtggacaaaaggattcccagaatttttattacttatatgtattagaacatattattttcaagtatttcttgagtctttttaatttatagtagtcacaattaaactgtattgaatgaagggaattgcagttgcagtgattagtaattcaagtttactgaatgactagtgaaagtcctttgatacttttatttgatattggagaattttgtaaatgtaaagtttcctaatacaaattttaaattttagttttgaaattttttcagtggaggttaacattcatcaagattaataactggtgtacttgataggcatttgaattgtttttttcagtgtcaaagttcgatcagcagctgttacctgtttgaaaaacattttagccacaaagactggacatagtttctgggagatttataagatgacaacagatccaatgctggcctatctacagccttttagaacatcaagaaaaaaggtctcttaagtaataaatgtttattgaatacccagcatatctaaaacagttctgtttgctgtgggtcatgactgttaaattgcttgaaatagtattgtactaactattaacctttcctataagtaatttaagccatatttcataaatccagggaatgtgttatttttaatttattatggcagtgtggaaaagctcagataggtaacctgaggaaatagtagttgatttttgggggaggggaaattcttaaagacagaccttgtttttttagaaatagaaagcgctactttgctcccatgaaagctgttagctctgggtatggtttatagttattgtgatccacaagtgtttatttccatgtcaagttaacatatcacaatcccctggtgaaatataggaagacccatagatttctccctttttccatgttgatatcgtaataaggttccactgtaagtattctgtgaagcatgtttaagaacacttgttccttccttagtctaagcattcctctttactatcttcttttcataaagtgactgagaaatacacagtttagttttcaccaatttaatttcagggcagaaacccaacattgaagcagtactttcagtgcatcataaatataattttagtgttagtaaaattactggtaatataaactgttaatgaaactaataatataacctggaaggcattataattctaacattttaaaatctcatttcattttgaaatcaagtctctgtggtagatgtggtctagttttgttcaagagacagatgagtcagagtttgtgatttgtgtaatatgctactaatgagtgacagagctgagagtagaacctaatttttctgctgcctaaagcagcagtttttgccataccactctgcctcttgtataaacataaatgttttcatcttaaaaggtaaacattgcctccagatttagttttaactgtatttagctttattcagaaagatttgttatactcattttgtgtaggaaaggtacaatgatttccacttctcttatttacattttctaatccctttctttctagtttttagaagtacccagatttgacaaagaaaacccttttgaaggcctggatgatataaatctgtggattcctctaagtgaaaatcatgacatttggataaagacactgacttgtgcttttttggacagtggaggcacaaaatgtgaaattcttcaattattaaagccaatgtgtgaagtaagaagattaattagtctgatataattccttgtttatgacctgtttatctaaagagtgctgtgatactgcacatcatcttcacataatatcacccccactcaaactgttgtaaatttattaaagtgagcatccgtatttagtcataactttatgcattaggtttcagcttcgggatagcaacatactagaggagttctaaggggtgccttgaataatttgttactaatgatagttaaaatactgctgattataaattatttgcattaaccaagagcctgttctaactttgtttacgtcttctgataagagcacctttattttccctgatatgctttcttgaataagaaaaaggagtggggcagcaatcagcatagcttttttatttttgaggatatagtacaatttatctcaacaaagagtaaaggtacatatcaaatgaaacaaagtttgtactcttccatcaaatgtgtaatctaaaacagcatactatgatgctctaagatttacagagttaatttatagcactgtcaaatgtgattcaacagaaatgtgaaaatacaacatctgatgaggtcaaacatctgctgattacagataactgatagagaagtattttcgtaatgtactcacattgaaagcaatgtaagaagcagttcttattttctacagaaaaagtagtgacagtgaataaaacatcaccttctctgcaatactacaccgcactcataccaattcagcagagtggtaccctgaacacacatacagcttatttctcattagtgaacaaagctaagatttttataaagttttacctttgagccagaaaataaaatgttccaaatatacatatgtacacaccccatttgtggtactttaaattctctagctctaaaactggtgttttgccttgtctttggtttgaaaaagaaaaagggtgcaattagtaatctataacctgtcttatgtgtgtgaagtatgatgaatatgatggatatggagtgtaatgattcattcatatgttaaatatggagtgcggtgaatagcaaaagtaaagctgaatactgttttaatgtgccagatgtattggagcacttttctgctctttggaatataccacaaataattacccaaattttatgcccagaagttgggcttattaaaaaataaacatttttaacatgactgttgtagttcttcactgaggttagaaaatgcataaaaatcagatttccaacttttgtcttaaacttttgatacctttttccctcttctatcatatcagaaaactccttctgttactaacgcttttcaactctgaaattgtatttaaagtggtgatataatttcatttgtaagcaatattctgtttcattatggtaatggcctagactggaaataaacagttacagtgtcactaacatatatatttgatattgatatactagcctagtgtggttttttaaacaccacctaatacatgttttttgtttgtttttttagcagtatgttgagtttatggcagattaatctatcatcttttagaaatttaatatgtcaacggggcatgaaaattttaagtaaaatgtattaattttactcatttttactcaaactattgggtggatttgtttgtatattctaggtgaaaactgacttttgtcagactgtacttccatacttgattcatgatattttactccaagatacaaatgaatcatggagaaatctgctttctacacatgttcagggatttttcaccagctgtcttcgacacttctcgcaaacgagccgatccacaacccctgcaaacttggattcaggtattctattaaatttttaacattaatactgtaaactcagttctagagaaagatggatttaagatggaatcccactaaaagcactttacaggattaaatctataacctctaaatttgtttcttcatctatggaatggagataaaagttgccaacagttgcaacaagttttcaatgaaataatgtgtgtaaagtgcctaggatagtacttgatgtatagtattccctcagtacattttggctattgataatgggtcaactaattgagctttcaatatgtgtcaggcactgtgcttgcactggcaatattaatgtgaaaaagaaacacccacattctagcaatggaaaaaacaaacacaatcagatattttaggtactgtggtgcagatacgatagaattttcatattttcagagctctggccaactcaatttaaaaagcagcctttggccgggcacagtggctcacgcctgtaatgccagcactttgggatgccaaggttggtggatcacttcaggtcaggagttcaagaccagcctggccaacgtggtgaaaccccgtccctactaaaaatacaaaaattagccgggcatggtggcaggcgcctataattgcagctacttgggaggctgaggcaggagaatcacttgaactcaggaggtagaggctcctgaggctcactagccaagattacaccactgcattccagactgaacgacacagcgagactgtctaaaaaaagaaaaaaaaccctttgtataactataattaacatttagtgtatatccttctaattgtttaaaacaaaaattgaactgtactttatttactcttataacctactttccttctatgacatataatgggtatttctcatgccaagagcataatagcaaaagaaattccaccaagggttgggtatgtataatacatatatgcatgcttgaaggctcattatgggtcagttttttaaacctaaattttataaaaggatacaaaattcacagatctttattgttaactgtctttattatatattattaatgtgttttatatgcaaacataaagctaggtgcaaattcacttgttgtacttaaagaccaatcaattctaatacaaatgttgatttaatgtgatattttgccacaactaatctgctcctcccaatccttccagtcacttcagcaaaggttgtgattactcagttcttccaattgtttcttttagttttactgctacaaccttcatttgacatgactctaatgtcatttagacttcagtttgctatgctttatattttatgtattttattttctgttggctaacagcaattacaaatctactatttggaaaaatataaattataaacatagacatagatgcccatcctgtgatcctactagattataggctgttctctaaatgatctagaatgtgcttatatgaattttccttaggccactgaaatgaaaatcctaaaataaaaattctcatagaggctttgtaaactatctaaaatgaatctcttatctttaattgggaaaatacaggtataagtgatttaagcatttaaaactttaatatgtaatttacagtactattaaaaacaatttttattacatagtttaaggtaatcattgtttatgataatctggtaatttgttatcatgaacatggccaagacttttttcatgtttatcacttatgtatttatgtcacaaccattggaaggtaaagtaactgttttattttatctgtatacagtgccaatatttttattaccttaagtgaaaatttaaacttcacatataaaattctgttattgaaaaggaaatacatatttttgtaaaatttaaatggtgtatcttttctgatggctataagcctcattgccttcactaaacgtcccatgtgcatctcaaactcagctgtccaaaagcaaacgtgtcatcttcttcatctcttcccccagcctacttttttaaatgtgtacctttttgacaaatggcactcagttgcttactctagaaacctctctcacgtatttcatctgattaccaaatcttgccaattccatattatgaataacttagtccatttgtttctctctgcccttagcatccttactgctttctagctccatgatttagcacagttgaaattctttcattaaattttccaagttatttcttgcttccagccatctcagatattattattattgcctgtagcactatcctttcctgctctgatgactattactcttctttcagatatcactttttcttttttcttttttttttttctttttttctcttgagacagagtctcgctgtgtcacccaggctggagtgcagtggtgcaatctcggctcactgcaacctctgcccctcaggatcaagcaattcccgtgcctcagcctcctgaatagctgggattacagatgtgtgccagcatgccctgctaatttttgtgtttttaatagagatagggtttcaccatgttggccaggctggtctcaaacttggcctcaagtgatccgtccgcatcagcctcccaaagtgctgggattacaggcatgagccattgcacttggccagtatcactttttctatgaaacttttcttgtctaggtgaggttccctctgctaagcttctgtagcattttaaactttcctattataacacttatcatattgtgttgtaatgtcccaggctagtcagtgagttctgtgtggtctgacatgatctgtcttgttcatgcttatatactgaggacctagcacataaaagatcttattgaatcaattaattagtcctcctttgaaataaaatataaattacaatgtaagttctcactttttttaagataacagtttcttttaaaagcaaaagaaatcctattaaattccttcagaaccaattttgtgttaggtactgcccaccagaaccttatagcatagtgggagacagacacataaacaagaaggaagaaggtgtgtaagcaagaatgcctgggactgaggggagatatttttgtttgtcagagtcagagcactttttccgatgctgtttggataaaaaatcacaaagaacaatgcttgctgttgtggactacatgagaagacaaaagaggtaatgtaatgagtgttgcttcttacgtttaggatctagagtgtaacttgttaactatcggctgaattttaacatgattattttaggtgaaggtgttgcaaagtgttatatttaatttgtgtgatatttatatctccttgcagtaatccatattcaggatagcagtttggttaaatcagtgtcaagaactctcaattctagtaccagctgtaccagtaaccatgttacctttgttaaattatgcagccttcttggctccaatttatttcatctatgttagggataggagcaagtgtttttccaagttacatttagctgtattacccctctttttacttttctctttgctttagttctaagaagtaaatagagttgtgtaaatgtcttctttatgtatctttattttaagatgtaagtttctttactgtgtgcagtggtctcaaaatctgtggcaatactgtgctgtgacaatgtttattttcttgtttctggtaaattgttttatagtatagtatctttgttcctgttatttctcatgagatttttaacagtgcatacagaaattgctagaatggatggtctgactgatgagtactgcttgagagttgaccagaactctgaagaaatagtgtagtaggcctataatttgaataggtaggaatcgatgtctcataagtgtgtatggtggtggtaggggtggttggtaaagaatgagagggagaggtgagtgaaaaatgaaatgtttttaagcctaaatgcattaatatcttaaaaaattaattcctatgtagtcttaaaccattcttcttctctagtagaaaaagaagttttatgcttttcagtgtctttgcttctggttattttaccttagagttttataccagattatcttctgaggaggcctatcagaagctttaatgtagtggagagcatttgttttcttggtgttgggaggcagttttacctttgagtcattcatttcagacttaccattggggtagaatggtgttgacattagcaggagttggagaagataaaaattcttcatattccattttaatgctgaataagatcctgaagaatattcctggagaaagtatgaatgggatatagaaaaacgggtaaagacatgcattcaagtccaagcttgtgctgtgtaaaaattacttgttatcctgtacagtatgttgggcaaaaacaaagaacaacaataaaacaacaacaacaaaaaaattgcttgctgtctttgaacctcagtcttatcatctttcaaaatcagaataatgtctgtagtgtcttcctttccatggggaaattatttcacttctctgaacttaacattcatcggaaaattaactttagttgagtgcttgctgtgtagtagggtgtgccttattcatcagctttgcaggcattatttaattgttgcacccattctccaaggtccatgttgttccagcatttgcaagtaaggaaactaggaaactgaggtttaagaagttaagttgctgaagatcacacagctggtagtaggcaatatagctagatttgaacctacctgtattgtacttcaacactagtgctcttaagcactaccatgtcccatctctacaatgctagttttgaaaaagatactatctatggtccctttcaatcttgacctacctattaacacagtggaagatttttattaagtaactcaacctaggcaatacattaaggagaaaataagtcacaataggaaagacatgtatttgtgtcttagatgaaacaatattttttattaaattgactgttttaaagtgtgtgttggggggtgcttgtgtgcatttgtattagctattctgtgtatcctattcttagtctgtggtacatggatttcttggtagagagcagatatgaaccccaattttgtatcaggtgatagtctacaggttttatcagattctctgataggtttgagggaaaaaagaaaaaccaaaaagattaattaaataggactcttcagccatgttatcttataatgtttataggtatatattggggaaatgtggtttttgggaatttgtaattttctgttaagcagtcactaccattgtattctatatcaacatgcttttattttgatattgaagtttaaaaaagtgaatgacattatatctcatttttctttagaccttcttcaggaacaatttttaatgatgctttctggctggatttaaattatctagaagttgccaaggtagctcagtcttgtgctgctcactttacagctttactctatgcagaaatctatgcagataagaaaagtatggatgatcaagagaaaaggtaatggaatttagaatttttggtttttaaaattaatgttggcattgtctcaataagggtatatagtaaagatttattttgcctcctgttccccatttaaaagatattttagatagaaattttgttttaaagtgaaattataataaatttttaaaaaggaatatgtaattcctgttctgaaataataggaatgcttattacttaggtattataaaaatttaacagatagcaaattcctataggacagagtccatacttaattttctgtatattccccataatagccctagcattgagaacttaatttaagggtgataaatatttttcaaatgattaaattatttcctaacttcagtcagattagatttaccactaatttctaaactattcaagattcattttggatataaaatatccaaaattataatccaaaatggctataatgtgactgatttatttctgtgactacttaagtttcatttctttatctacctatatttctagtgaatttaattcgctttcctctgactgagttagaactgtcataagaatctaataaatatactcctagatcatggggaagaacaaaaaataagaaagtaagagtaaaaaataaagtaaaacactttattatcccaactgctcttttcaaatgtttgttcgtttgaaatggcctgggtctcattatttcgcccaggctgtggtgcagtggtgcgatcatagctcactgtagccttgatcttccgggctcaagtgatcctcctgcctcagcctccaagtagctgggactataggcacacaccactgcatccaactcattttttttaatttttatttttaatagagacaagatcttgctatgttgctcaggctggtcccaagctcctacgttcaagcagtcctcccacctcagcctttcaaagtgctgggattacaagcatgagccgctgcacctggtcccaaattgttttttaaagcggttatacccatttgtgtacagaaatgtagttgataaggaagtggatcagtaggaagccttatatttgaagaagggagccaaagtataactgttcctagtttagttaaaaaagtaaagaaggttgggcacagtggctcacgcatgtaatcccagcactttgggaggccaaagtgagaggattacttgtgaccaggagactgagaccagcttgggcaacatagtgagacctcagctctactaaaaataaaaataaatcagctgggcatagtggcctgcacatgtagtcccagcaactcaggaggctgagggaggaggatcgcttgagcccaggagggagaggctgcagtgagccatgattgtgccactgcactccagcctaggcgacagagcgagaccctatctcataaacaaaaaaaaaaaaattaagaaactggaatatgtatataggtaaatattagaggcagtatcacttatgatagtatttattttatgtactagattattactgttatagacaccacagctgtcatggttttagaattgaagttacttacagaactgaatgttatatgtataaaatgcataaagttaaggccttgaagtaggcaaatctgagttctaatcctgactgtcaaactttctagttttatagtcttggtttaagtggatcctactgatctacttccttttcaatagttaatatcagatgtcttaaatttatatctgttaagtattaaattctgtcttattgtggtctttatttgtgtgtctgtaattattgattgggttgaatttcaggtgaaaccactgacagagtatatagtacctgaattggatggcatctgctctatttttaaacaatccaatctctttataaataatcatatttttgcatataggcttcccatatgtagattattcttaaaatataattttcattcacaaattccttttccatcctaggtataaatggtattatgttttaaagtataagtgatttattctgttttgtttgccaccttcattagtttttttctgtcaaagtctatagtatatgtattcaggagcttccaaatagtatgttctcattaaaagaggtgttcttgtgacaaacagaagtcttgcatttgaagaaggaagccagagtacaactatttctagcttgagtgaaaaaagtaaagaagaaactggaataagtttacaggtaaatattagaggctctattatttatgacagtatttatctcatactttgggttattttgttatagacactgtacagatgccatgtgatttttaaactgaatttacttactggactaagcatcatatatataaaattatggtctgaagcttaagccttagagtagacagacttgagttctaatactgactgccacttcttgagttccttatctgaaagacgaaggtaaaaccacctgtctcagagtttatgccatgcattttctgccatagcaccctgttcatttcctttatagcacttagggtttataattatatatttatttgtttgcttgtttattgtatgttacagaagaagcagattgcctcttctataaatttcttgatatccattcttaaattggctcatgttactgtctgggatgcttgccgaatttctttggtcaactcattcctccacaatgacaatttcagcttctccattctgcttaaacctctcatcttctcttctatgccgctgctttcagcctgcctcctacttggagaaaatagaaggcatagagaggaaatctcgccacatcccactctcaaacattgaaatctcctggcatctcctcctttaataatcttccgtcatgttacagaaacagtttatccttctatttgagactaattcttcctgtgctttgtttttttatctgctctttctcaggtgctttattttttaatatgctgttctccctctgaactatgttctgaacattttaaaacctctcctgtttaaaaattccctttctcacaaagacaaaataatttccctcttccctatgttctcttttaggtatcaccctctctcttccttcctctcacagacaaactttgtgaaagagttgtccatatttgctgtctgcatttcccccccttccatttattccagtaaaatagcacttgctaatgtctctcataaacttcatgttgctaagtctggtggtcacctttcattcttccttttccttaatgttttattaatacttcacatcatcaaccatgccttgcttgaactgtgttctgtttacctttttgatccactctcctgatttttctcctttcacttttgccttcttcataggctcctcctctctactgagtttttggaatatcgtgtgtgtactaagcactgtgctaagcatgggtactgaacttttctactctgaggacttgatttcacgttatgaatagaaacatttgagttggaactatagaattatgccaatataaatgaatttgtgtgtagaaaatatttcacagagcaagcaccatataggcagttcaattgcttgatcaattttctatgcagtatagttcctaattttttctattttattttttttatgttttcatttttatttaactgagattgttttaaacagaatatatcttttctgtgtaaattttacaacaaagatttcagtaaccaaactactttatccatatcaaattttaccaattccaatacagttttgtgctatttttcaaagaaaaatccacgacctttattcttaccaaattgagttttcaagagtcagactttgtaggactgtattttctaatgtacggtttttttgtttttttttccagacaggatctggctctgttgcccaggctggagtgcagtggtgcagtcataacacactgcaagctctgcctcccaggctcaagccatcctccaacctcagcctcacaagtagctgggactacaggcatgccccaccatctccagctaatttttgtagagataggtttagccatgttgcccaggccgatcttgaattcctgagctcaagcagtctgcctgccttggctacccaaagtactgggattaaagatgtgagccactgcacccagcccatgtacagttttaggtgttgacaagattgtttggttttgtttgtgtgattttttttttttatgtgatataagcctggtaggtcggtacttatttcttatctaattcatgaaattgtaggcaattcttctcgggtagactacagtcctcctgttgtctaggaccagtctactgtgttgctgatccaaatcattagtatatacagttgacccttgaacagtgtaagggttagaggtgctaaccccctgtgctattaaaaatcagggtaaaactaaattagtagtcaaaagttaactactaatagtctactgttgaccagaagccctaccgatgatataaacaacataattttgtatatgtattatatactgtattcttaaataaagtagcttgagaaaagaaaatgttattgagaaaatgataaggaagagaaaatgcatttacagaactgtactgtgtttatcaataccgtaagtttatatcatctgtttacaaagaatcatctgtctgaaattgtaggcaaccactgctggttgatatgtactttaggcctcaatctacagaatgtatcaaacaattcacctttttcttgtaatggcatgacttttctctgcatcttggaagcacctccagccactgtggtgttaatcaaggcttatagtattgcagtaaacacagtgaaaaaatacatgagaacctggagagattacttttcatttctggatacaatttactagagaaatgaactgctcatgtggaaattattagtgtcacatggcattttaagcagatactcacaacacaataatgcttaccgcagtagcaactgaggtagctgcaaaattattacaatagtacaatatgtacgatagttaatcttatgcaattatgatttaatactgcatctttacatttgtttatatttgtcttaaccacaaataatgctgtgtacagtgtgtgtgtgtaagttttgataaattttaactctttgtaatagatttgtgtatattttatggtagtaaatgatgaaatgtatcatatcaaatgtatacaaatgatggaatgtgtagactagttgtacatttattttatgcattcatgacataacttttaaaaaatttttcaatagttctaaactgtgtggtttgtgaattttttcaaattgtggcaaacctccaaaaagttttcaatatatttattgaaaaaaaaatccacatataagttgtcctgcacagttcaaactcgtgttgtttgaactgtatttcagaactgtatttcagaatcattacattttatttctataacataacatttagagttgggagttacatattggtaatgatacaatttaaaatttgctaaatttatagaccgattttttttccttcttcaatttttgttgtttccatgttttcaggatcttctcttagaaatctacagaagtataggggagccagatagtttgtatggctgtggtggagggaagatgttacaacccattactaggtaaattgcatttttctaaacaacggtatagtaattctgtttatgaaggagttatgtgtgtgtaaaacccaaagctattttcacaatcttttcttatagactacgaacatatgaacacgaagcaatgtggggcaaagccctagtaacatatgacctcgaaacagcaatcccctcatcaacacgccaggcaggaatcattcaggtacattttttcccagatttggtaaagccatcactagtgtagtgctgaggttatttcagtatgttggtggatatttacacagccagataaactctagagataagactagaacttatctgtttttcagaggattaggctaaacattcagggatactcctgaagcagagggatgcaaaaaaaagagaaaaaattcagggagacacaggaaagtcagacaggtcattgacctaaaagatagtgtagatttcttgatcatagtgttgttggataacaacagaagacattgctcgagcatatacaatgtgccaggtagtgtacttactgcttcacatggaaaatcttatgtaaactatttctcatagtttgcaacagagttggtcccagaacctgttgtttctattactggctaatactccttagccattcttccatgaaatattagagccctttgagctctatttttgtgttttttgggaaacattaaacgatattttgggattaaaaaaatgtttttggccaggcgtggtggcttgcgcctgtaatcccagcactttgggaggccgaggcgagcagatcacgaggtcaggaggtccagaccatcctggctaacacggtgaaaccccgtctctactaaaaatacaaaaaaaaaaaaaaaaaaaaaaaattagccggctgtggtggcgggtgcctgtaggcccagctacttgggaggctgaggcaggagaatggcgtgaacctgggaggcagaggttgcagtgagccgagatcgcgccactgcactccagcctgggcaatagagcgagactccatctcaaaaataaataaataaataaattttagagataaggtgtcaccctgttactgatgctggagtgcattagcgtgatcatagttcactgcagccttgacctccctggctcaagggcacctctcgcttcagccacccaagtagctggggctacaggtacacactaccatacccagctatttaaaaaaaaaaaaaaaaattgtagagacaggtcttggtttgttgtccaggctggtctcaaactcctgggctcaagtgatcctcctgcctcagcctcccaaagtgctgagattacaggcatgagccaccacacccagctgatattttgggattttaaatgatattgtgaactaaaatttgtctaagttaatttgtatctttgctgtttttttctctggttttctgttgatatctttgattacttaacttaaaaacaaaataactcctgtttaggccttgcagaatttgggactctgccatattctttccgtctatttaaaaggattggattatgaaaataaagactggtgtcctgaactagaagaacttcattaccaagcagcatggaggaatatgcagtgggaccattgcacttccgtcaggtaagaaatttgacttgatttttttttttttgcctctctcctcattctaaacaacaactgtttttctcttctatgaatataacaggagttgttttatatatatatatatatatatatatatatacacacacacacacacacacacacacactatatatatatacataccatatatatagtgtgtatgtgtgtatatatatataaaaaaatatatagtagatgttgcaagctatagatagccctaaatccttcagtaagatagcaataagcagttaatgcacctaggcttgaattttactctcttattccattaggacaacttcaccccacccctaaatatttctaaaaacagaaatatgaaaagggttttcgaaatgagtatcatctcgcatagtttgttggactgaggcatgccaagaaaagtataggcattcctctttctacttcctgctacaaacattttagtcagtaagatagcacttatattggctggaggatccacaaaggactgcttatctttatttatgaaatattttcttttattaaaaaataatacggccaggcacggtggctcatgcctataatcctagcactttgggaggccaaggcgggtggatcgcctgagctcaggagtttgagaccagcctgggaaacacggtgaaaccctttctctactaaaatacaaaaaattagccaggcgtggcagcatgcgcctgtagtcccagctacttgggagcctgaggcaggagaattgctagaacacgggagacggaggttgcagtgagctgagatagcaccactgcactccagcctggacaacagagcgagactctgtctctaaaaaaataaataaaataaaaaaaataatatgcctactcagggctgggcacagtgtggtggctcacacctgtaatcccagcacttggagagctgaggcagatggatcacttgagatcaggagtttgagaccagccgggccaacatggtgaaactccatctctactaaaaatgcaaaaattagctgggtgtgctggagcatgcctgtaatccaagctactcgggaggctgaggcaggagaatgcttgaacttgggaagcagaggttgcagtgagccaagattgcaccactgcaccccagcctgggcgacagagtgagactctgtctcaaaaaaacaaaaaaaacactcagttacccaggaagataacatttataatctgtatataaggtcaccatgttttctgaatgaaaagccaagcacctaatctaataaaggatttcatatttatgtaaagttttttgataatgtaaaccctaaaaaattaattatgtttaagtatgttttgttgcctttgtagaaaaaaaaaattattggccgagcgcggtggctcatgcctataatcccagcactttggaaggctgaggagggtggatcacatgaggttaggaattcaagacaagcttgggcaacatggtgaaaccccatctctacaaaaaaatacaaaagttagctgggcaaggtagcatgcatctgtagtcccagctgcttgggaggctgaggtgaggggatcccttgagcccaggaggtggaggttgcagtgagccgagatcatgccactgcactccatcctaggcaacagagtgagactctgtctcaaaaaataataattattggaatgcctttcaaatatttcagactgtaagactgctataaaattagagatatatcctcatattttaaaaaccttttcctgtgcgagttgattcttgcttgcctctgtaaatcaatatatactattcttctccttcctcttgtatttcagctacacagacctctctgtgttttcttgtcaggccaagctgtttctatccaagggccttagatgtatcttctccttttcccccagttaccatgcgggtggcttcttttcattcggaccctagttaaataataatgtatcttcagagaggcctttcttgattacccattctataatagccatctagccattttgttttgttaccctgttttaattctctgcatgtcccttgttactttccaatacttatttattgtctgttcctccaaaccagcacataaattccatgagagtaaagacctgatctgacttgtccacttgtgaattccccttgtgcctagtgcctggcacataataggtatttattgaataaataaatgaaagtagagcatatttagaaccaggcagagtatctgagtaatttcctttttttctgcttaaagaatttaaatgactcataaaatttgtatttcttaccaaaaattctagaaatgcattttttagaatggagaaatgttaatttaaaaattttgtcctttggtgaagctatttatacatgtatatcttagggttctgtttttaagtatatttttttctttgacttatctcacagcaaagaagtagaaggaaccagttaccatgaatcattgtacaatgctctacaatctctaagagacagagaattctctacattttatgaaagtctcaaatatgccaggtattatgaaaagacaaagttactgtattttaacatttaatgtcatggcttcttttctgaaaacttgagaaacaattttaatgtaaggatttgcattgatgaagagataaagacttggtggctgtgatcagatgtttccttgtaattctctgccctccttcaaaacaaattgtttctgggattccaggttcattctttaccctgacccttcaagaaagttttggtgattccctctttgttctcttcctatacaagtatcctgagaattatatcttgtctcttttggtaattgtatggcatttagtgttctaatttataaaattgtaactcacggttaatacttacaaacttgttttgaggcacaaatgtgatgaggcatgaggaaataattataatggggtaaacaaatgcagcatttttaaagccgtagtgacttaataaatcctatgtttatcacagaaataaaatttactatcatttaagtgcctatgatatgctagccactgttagactcttttcatatgtattctctaatcatgacaataactatggatgtgaaaaaaggcttagagaagtccagtaacatgcccaaagttacacagctataagtgacagaactgcaatttagatctaggtctgtgtgattccaaggtttacagttgatccttgaaccacttggaggttaggagtgctgagcccctcctcctcacacatttgaaaatgtgagtattactttgactcctcaaaagcttaactactaatagcttactgttaaccagaagccttaccaataacataagcagtagattaacacatattttgtataagtattataataccatattcttacaataaagtaagctagagaaaagaaaatgttattgaaaattataaggaagagaacatatatttactagtaagtggaagtgggtcatcataaaggtcttcatccttgccaccttcatgttgagtaggataaggaggaagggttggtcttgctatctcaggggtggcaaggtgggagaaactctgagtgtaagtggaccatgcatttaaatttgtgttgttcaagggtcagttgtattttgtttccactgctattttgtattcactgttgcttgttagtattattagatcagtagcaaagcctatgatgagaactctttaacaacaaatttaaacatttatttccctgaaaacctcttctttattttcagagtgtcttttcttttttgctactagagtaaaagaagtggaagagatgtgtaagcgcagccttgagtctgtgtattcgctctatcccacacttagcaggttgcaggccattggagagctggaaagcattggggagcttttctcaaggtatgtaattcgtatgactttgttatcctaaagtgcagcttttctgttaccaatagtgactttaaaaaataaaaactataggccgggcacggtggctcatgcctgtaatcctagcactttagaaggctgaagtgggtggatcacttgaggtcaggagttcaagaccagcctggccaacatggtgaaaccctatctctactaaaaatacaaaaattagccaggtatggtggtgggcgcctgtaatctcagctattcaggaggctgaggcaggaaaattgcttgaacccagcacaacaggcagaggttgtggtgagccgagattgcgccatggattccagcctgggcaacagagcgagactctgtctcaaaaaaaaaaaaaactatgtagagaccaaatgtgtgtgtttctttccttttatcaagatataagttgattagccctagtgaattgtgcttttattaaacattttccaaaatagtcattgtaaaaatttaagttttaaaaattcagcttaagtgtgcttttctctttataactttttccctggcctaccaagataaaattgtttcctcatgtttttgcatagcatgataacactccattcagttttagcactacattgtattactgtcattttatctctgccttgctaaactagaagctcccttaaaagtgggaaccattctattgtttattgttgtatacctagtgtttttgttttgttttcttttttttctttttatgtttttttgagaccaagtctcgctctgttgcccaggctggagtgtcatggtataatctcagctcactgcagtctccacctcccaggttcaagcgattctcctgcctcagcctcccgagtagctgggattataggtgccccgacaatgcctggctaatttttctacttttaatagagacggggtttcgccttgttggtcagcctggcctcgaactcctgacctcaggtgatccacccgcttcagcctcccaaagtgctgggattgcaggcgttagccaccatgcccggcccccaatgttttctcttctggtgactgataattatgtttagtaaacattcagtggatagtggatgtcagttaatttgtaaaaggtgttcagaaggaattgcttcttataatggtgagagggaaatgatccagggattttggaagatgaaatagtatagttactcaggatgctgtagatctaaattctttccttttatcaagatataagttgattagccctagagaattgtgcttttattaaacattttccaaaatagtcactgtaaaaattcaagtttaaaaaattcagcttaaaagtgcttttctctttataactttttccctggcccacccagataaaattgtttcctcatgtttttgcacagcatgttacactccattcggttttagcactgcattgcattactgtcattttatctctgccttgctactagataaaagaagtggaagagttgtgtaagggcagccttgagtctggcaggatgacaaagtaaagtgttttgggtcctcagtttcctcatttctaaagtcagggatttgtattcgatggtctctaaagccccttttagccctgctattttgaattactattattattatacgagggaagaaagaggatataaatgactaaggtcactctacctttatgcaaaaataaaatttggaatatgttttggaagtagaaaagagaaggaaattttagagtcagaagaaaataataatagttttttcaaaatgacatagcagaagacatacatattaatgtggcttaggaggaaaataaaggaacaaaagtcttttctgctttcattcataagtacattggcagtacttactgccagaaatcaagaaatttttcctctgaatgaaagattatcctgctgaaaagagtatagaattctttaagaaacagtgaatagaatggtagtaaccagaggcagggaagggtgttgtggagggagaggatgaagaggggctggttaatgagtgaaaaaacacaggtaaatagaagaaataagatctagtgtttgatagcacaatagggcaactgtagttaacagtaatttactgtatatttttaaatagctacaaaagaagatttggaatgtttccaacacaaatgataaatgtttgagatcatggatatctcaattacccaaatttgatcattacacattgtatgcttgtatcaaaatatcacacgtacctcataaatatgtacaactattatgtatccataaaaattaaaaataaattttaaaaagaaacacctaaagaataatctggctgtttctttggtagagaaataggaagaagagaagcagagggaaggttggatgaactggtgaacaaatgcttatgctctcagattacatttcattcatatacatcaaccaaaacattaaataataacaaactaaatgcagaagcagagataagaattcatctcgttctgttaatccagacattaaagagatttgcaaaaatgcaaaacagtgccatgctcactaagttttgttttgttttgggaagtatacagttgaaattctttatctacaggtttccatctatggattcaaccaaccgcagatcaaaaatatttgaaaaaaaattttaaagaatagggtataacacttatttacatagcatttacattatagtaggtataatatgtaattagagatttatgtataacctgtgcacattctcctattacacgtaatctagaggttatgtgtaatactttttggaaatgtttaataaaagcacaatctagaggttacgtgtaataggaaaatgccctgccattttaaataagggactttgaacatcagcattatcaaggtgtcttggaaccaattttctgcagatacagagaaactactgtagttatttttcctaaaaattgttatttatgatatatagtagatttattatttttgaataaattaatacattttagatttttctcagtctttctaatatgatatcatatctaatatcagtagatatggtccaacgatcgaaagttctttggggtcttcaataatttgtttgattgtaaaggagttccgcaaaaagtttgagacctgctgtggtagggtcatttagagaggaattgaagttttggttcctagcatttttgttactgttccttccctatcaagcaactaaaagagctttcatttcttagtcatcactttgtcatcttactctccctgcttcctctttcttatttctttcaataaatgtccctgaaggattgggtagtatttcatagttcagttatttgggaaggatactattcatataaactaattgtgcaatatgccttttctgttcctttaataatgttggtaaatgaaacctttgccagatgccagcttttccttcactggattgtgatttttttgacagctataattatgcatcaagtcatccccagtagggggtccctcatttccttgctgacatgtcctcattactacaggcagtattgaagcaggactaaagatggaggcattctttatgataggtctgatgaatatgttcttgtttcagaagagtatttagaagggctgctttttgtaatgtcagagtattaaaaattttttttgatgtttgtcatctgtgacctctctgctaataactcttaagagctctgaccgcatagcattttgtagttttctaaattttgatccatatgtaggattatttacaagttctagtcttgtcactacaaaagttcctttgtattattataatattatatcgtaagttccagaacttacatagttttttttttttttttttcatttctcttgcttacatgaactctatgtcgtggcattcagatcagtcacacatagacaactctctgaagtatatattaagtggcagaaacactcccagcttctcaaggacagtgattttagttttcaggagcctatcatggctctacgcacagtcattttggagatcctgatggaaaaggaaatggacaactcacaaagagaatgtattaaggacattctcaccaaacaccttgtagaactctctatactggccagaactttcaagaacactcaggtaaatacaatttaaaactatgtcatcttacctcttgactttccttttattatttaaaaaacagaaagcctgagggaaaaagaaatgtcattaagagatagagatctctattaatatatagtaaaaataattgtttaagagttcccattttggaattagatctgacttttaagccttgggcaagggtacttaatcttttctcaacctcaatttcctggttataaaatgagaagatacctaacttactatattgataacaattcagtgattttatatactgtgtgtatgtacacacagatacacatacatacatatagagagagacagacagacagacagataggcagacgtggggtggggagatgtcatgcagacagagaggtccttaagatagtccctgacaagtagttaagtcctcaatgaatggtagttgctgctttcattattattattcatggtagtagtatcagtagtaaaagtatttattcccatatgtcattttcatttcagctccctgaaagggcaatatttcaaattaaacagtacaattcagttagctgtggagtctctgagtggcagctggaagaagcacaagtattctgggcaaaaaaggagcagagtcttgccctgagtattctcaagcaaatgatcaagaagttggatgccagctgtgcagcggtttgttttttttattggctggattagtgttttactgttatttaaaaaaacacaaatgtactttaaaatatttttaataacaattttattagagccttgaaattagtaatttattaacaagatattgtaaaactagtcttgaaaattaatttgtaaatgaagtttagaaactttttcctatatatcacaattctatcagtccatcatgtggtcgattcatttaatatatcccagtattaagcctttaacttcctatagaattcaagaaaggtatgtgggaaatgaatgaaatagctactctaaatttgaaatgacaagtgaaaaaagggaagaggaaatgaatgagagaactaaattagaaaataaaagcaagttgggacaattaggttgtcaatccaaatgctttgaaaatatcacatctaatattttatctaacattacctgttggtttttgcaaacttatgttgctacttcagctgtaaacccagcatacacactggataaagtagaggcattggtgtccccaaggtttgtctacagtggtgtcccacagacatgtacctgcttagtgaatatcagctcactgtgctttattatttatttatttatttattttttgagacggagtcttgctctgtcacccaggctggagtgcagtggtacgacatcggctcaccgcaacctccacctccctggttcaagcaattcccctgcctcagcctcccttgtagctgggattacaggcacatgccaccatgcccagctaatttttttgtatttttagtagagatggggtttcaccatgttggcaagactggtctcgaactcctgagctcaggcaatctacccgccttgtcctctgaaagtgctgggattacaggcgtgagccaccacgcccggcctttactgtactttttgatgttgggcactcattgtatagcatcttctgttattagagaaatcattataccaaagcactgagtgccaatatgatatgtgtaaatattgcttaatagtattggccctgaagtatgtgctgtctggagttacccaacttccttgtacctcagttttctaatctgcaaattggggtaataatagtacttatttaataggattcttgtgagaattaaatgagttaatatatataaagcctttacaaagtgtctgacatatataagtactcaataaatgtgacttgctccaataatggcaataataataataaacagaggatgatcatttcctacatgggattattaaaatagttgtatggcaaaagcagatgaggaaaaactttttttttcccacccaccaaggaaaaacatttttaacctgcttttttccccgtacatgaagggcagttgggtacagtcatggtaatgcattatattttaagattttgcctttcttatacagaacaatcccagcctaaaacttacatacacagaatgtctgagggtttgtggcaactggttagcagaaacgtgcttagaaaatcctgcggtcatcatgcagacctatctagaaaaggtaagatttttggagcaacccttaagatagttacttagcatgaatatgcttcatcttttcatcaagatcaatatatttccaaagcaaataaaagtatggttttatttttctatatattattactgttgtagctctgtatagtctctagggtggagtgaaacattgttacaaaacaaagcagccaattttgaaagtaagcccaagtatagtatctcttcttcctccttcctacctccactaccagctaccctttcagcaggttgcttctgatcatttcttcatttatgcatctacaaaaataactgattaagaataggcaagtcagcccttgctcttcattagcccagccacccacaagtaaaggcttcaatatactagcccctttgactttcctgtttctccctcttattcctttagattcactaattttggaaatagttacctcactaaataagtgtaacatgaaacacatgatgcgattgtctttcttttcttttcttttctttgagatgaagtctctctctgtcgcccaagctggagtgcagtggcgcaatctcggctcactgcaacctctgcctcctgggttcaagcgattctcctgcctcagcttcccaagtagctgggactacaggagtgtgccaccacacccggctaatattttttatttttagtagagacggtttcgccacattggccagtctggtctcgaactcctgacctcaagtgatccacctgcctcggcctcccaaagtgctggcattacaggcttgagccaccacacccagcctgattgtctttaaattttataaagttctctgtttttgcagagttctttacaagtattagctgtctgggttatttctacactgtcaaagttgttttgaaaagtcaagaaaataccatagttcagggctgtccaatcttttggcttccctgggccacattgcaagaagaattgccttgggccacacataaaatatactaacattaatgatagctaatgagcttaaaaaaaatcacaaaagaaatctcataatgttttaagaaaatgtacgaatttgtgttgggccacattcaaagccgtcctgggccacatgcggcccatgggccgtgggttggacaagtttgcaatagttcatataatttagctagcttttatatgtatataagttaaattttagtgtattaccttaatttgagtgattctttagatgtatttagtatttgtaaatataatttaaattggttgtgttttcttgaaggcagtagaagttgctggaaattatgatggagaaagtagtgatgagctaagaaatggaaaaatgaaggcatttctctcattagcccggttttcagatactcaataccaaagaattgaaaactacatgaaatcatcggaatttgaaaacaagcaagctctcctgaaaagagccaaagaggaagtaggtctccttagggaacataaaattcagacaaacaggtaactaggtttctacaagtgacaattttatgttcaccagttaactgagtgagtgtttttgcatagaaagagtgacttggtctttttatctgatatagttttgagctctaaaggtcggcttaactatatatagattatcttggtcttttgggttcttttcggtttttgttttttgtgtttttttttgagacaaggtctcactctgtcacccaggctggagtacagtggcgtgatcactgtactccagctcactgcaacctcgacctcctggactcaattgattctccccctgagcccccgaaatagctggggctacaggtgcacgccatacctggctaatttttgtattttttgtagagatggggttttgccatgttgcccaggttggtctcaaactcatgggctcaaacgatctgcccaccttggccgcccaaagtgctgggattacaggtgtgaggcactgtgccctgtctgtcttggtcctactgtagttaatcacaaattagtatgtaagatattgacgtgttcttttgtgaataattcatgctctgcttctaagttcattgtggagaatatagatattagctttctgttttgcttttttggtttgtttgttggtatcatagtggaaaaggagatagatattgaaattaattacaaaagttacctattttgatgtaattaaatccctttatttaagcctgtcttgaatctgtatattttagtgtaagcagaggtgtaagttagctaaatagcttggggagagtcccctttgtcctttgatgcttaggaaggtgtgtgaattgcacagttaagacaaaagtaagtttattccctttataatccttagaagtttgcttttttccctgggataaaaacccaacttttttcattaaatgttgtatatcatgtgtgattttgtagttctgttaaagttcatggcttttgtgttttaccttaattattctatgcaagatacacagtaaaggttcagcgagagctggagttggatgaattagccctgcgtgcactgaaagaggatcgtaaacgcttcttatgtaaagcagttgaaaattatatcaactgcttattaagtggagaagaacatgatatgtgggtattccgactttgttccctctggcttgaaaattctggagtttctgaagtcaatggcatgatgaaggcaagtgttactcagcccaatattctaccctgtgcttgaaaaacttagacataagccccttgatgtcaggaatcgtgtatacctctttgtattcctagcacttggtccagtgctctacacataagtagcattttgtagttttctaaactttgatccatatttaggattatttacaagttctagtcttgtttctacaaaagttcctttgtattatataagctgacaagctgtaaatgatgcaagtttgtgtggaggtgatagaatttagcttggtcctatgtctttgcagttaccataggagagggtctagaatggggcattagattggaggatttagaaagcagttaaagatgatgtgatcacaggtgggttttccccctgctgcagaaatatgggatttttacaataaattacttttgtaagtagagaaaatatatttttcagaaaatgtcaagacagcagtattgtataagtttttctttgaaaaccttagattatagtgatgacacctaatattaaatttaagttgacaagctatatattgttagtcaatttgaaggttagagataaaatgtttctcctgcaggaaaataataagactcataatagatacagtcaatctctgctgtagtatacactaaatattacttttggcctatggggaaaagcaattacttcattttattgtacactgacttctcaggaatcaagatcacagtcacactcagatcacatttgtcttccttagattttttggaatataaacagtaccaagtattctagttctgaatccagtttaatttaggaccaaatattttgatttaccaatgcattaatctagagtacccattagaaagaccttcagataagaaaagaaatgaaggaaaacaatatagttagtgaagttttgttaaccacttgtgctaatagaggagcactgtcttaaaataacttacttgcttagatgtgagaatatttgaaataccttgtttcttaattttgtgtcttttttttaatggtagagagacggaatgaagattccaacatataaatttttgcctcttatgtaccaattggctgctagaatggggaccaagatgatgggaggcctaggatttcatgaagtcctcaataatgtaagtaaacctgaaaatcaaaccacaataattatttttattctattattactatatattatataaagtatatataccattccctctaagaaatggaaatacaaaattttgtattttttgtcttctcacatcacataagttactcattttctctctctaattcctcataggcctctgcctttttctcacacatgcaggcatacacgctctacccactgcagtatctagacagtaatacacattttaatgttaagcaaaatgaaaaatatggattatatttttttgtttatttgcataaatctaatagttcttttcttacagctaatctctagaatttcaatggatcacccccatcacactttgtttattatactggccttagcaaatgcaaacagagatgaatttctgactaaaccagaggtagccagaagaagcagaataactaaaaatgtgcctaaacaaagctctcagcttgatgaggtatttggattaaacatacgtaccttttagaagtgtgatattcagtctttcctagaatatttctttttaaaatcttgtgttattaagatgccatctaaaatcggttcaaggctggcacggtggctcacgcctgtaatcccagcactttgggaggctgaggcgggtggattacttgaggtcagaagttcgagaccatcctggctgaccgacacagcaaaaccctgtctctactaaaaatgcaaaaaacagctgggcatggtggtgggcacctgtagtcccagctactcgggaggctgaggcaggagaatcacttgaactcgggaggcggaggttgcagtgagccaaggttgcgccattgcactccagcctgggcaacaagagcgaaactctgtctcaaattaattaattaattaattaattaaaattggttcaaaattccttaatatttgtcaaagcataggagataccagtagtagtttacttttttcctcaaagcagttggcaaagtgaaacaatagattttgaaaggcacctaagtcattgacgagagtatgtatctttgatgtatttcatttatgactgttttgtttgtatctgaggaattataatcattccattgtctagatttgtgcataaattctgtttttctctttgtttttctaactctgagaagtttaaatgttgggtagttccttatgtaatgttttttgttttttattaataggatcgaacagaggctgcaaatagaataatatgtactatcagaagtaggagacctcagatggtcagaagtgttgaggcactttgtgatgcttatattatattagcaaacttagatgccactcagtggaagactcagagaagtatgttttttttaaagaagaaacgttactttcttgctgtgttactctctgtagagatatattagttatagagcctaataagtaaatctgcttaaaatcacaaacgtaatccaaaagcttaatttatatctgatggcttcaacattccctggttactttttcacttaatatctcttaatagaactggtaataggtgactacactaaattaattatttgatttcttctgataatcttctggcatacatacttattacagagaattgcataatagaggcaagtctattaaaataattgaataactgaacatttctagcctcaaaagtttttttaaacgatgtggttactaaaactgccctgggacttaaaaacaaaaaaaggctttaccatttcttccataggtgctaaaatgccattatttaattattattcttgctgtgtcagttcaaataattacaagctgctatataatctttggttttgtgactagtctctaagtatgcttctaagtatctccccatactttaataattgtatttttttctattcagaatcatatcttcaagtttaaattcttattacttgaaaacgaatgggacttcacatattgtttctctaagcaaacaaaaagtattgacatgtcttttagttgcatttaatggtaatgtgacaggagtatgttatctatgtactatgcaaactattacgtaattattttaagatgtttagtctggttcctcaggtggaatctggtctagttacccttgtcaggtaacctgcaaatttacttgaagctacattaaccactgttgagctttgactctgagctgcatagtggccaaagcccagagtcttcatttctcaatcagagcctgaaccacagattagcaacaagttggggccagtggtatctgctgactattcctgcttgaccttcaatgctgttcctcagtttgtcactaaaatctcttcatttttaaatacagaaggcataaatattccagcagaccagccaattactaaacttaagaatttagaagatgttgttgtccctactatggaaattaaggtaatttgcaattaactcttgattttttttaaactaaattttttttattagattgaaccatttgaaatagtatttttatgtaggtcaaaattggttaaatattggcaaatttcatatgtttcaacctataatttctcagtattatatttcctttgcccaagccctaaaatactcaaaagcttctcttgctttcttttccattgccttctgttctacacctcccatctttcttatgaaggtctatagactgtactttcattggccagaaggagagtttccgtgtgcttatgccaagattaatttttgacttggcaaggaaggttccaattgtcatatattgtttttaaaaattctatgtgcagtaaaatgtattggctgtgatatatcacagtattaagtaatatagtatgtattattataatattaagctgacttcatatgcatgatacacttagctctgttctaatattcttttattgcaagaaataatggaagtaatttcatgtgggcagggatatatgtaataagggttataagtttagaaaatgatcatcttaaatacattgtctttcttttcattttgcagtttagtgcttagtatctagttacttgatttgaaatgtagctgtatcgtgtggattaactgctgtttttctagctatatcagctaggtgatttcgctgaatatttccttaaaatgccagatttagcagttataacccagaaaactccttctactgttttccaaaatttactttatgttttcgtgaggagttatttctcagatgactttacatatattagtgaatctttgatgaaacagtagttaaagttacgagcgtgagccaccacacccggcctaaagttgtagttcttaaccactatcacatcgtcatttgtttctctgtttaatattaaaattgccatttataatgtatttttctttaagtgcaaatagtgtatctgacctattatcaatcatgtttatacttttattaggtggaccacacaggagaatatggaaatctggtgactatacagtcatttaaagcagaatttcgcttagcaggaggtgtaaatttaccaaaaataatagattgtgtaggttccgatggcaaggagaggagacagcttgttaaggtgagccttcccttctctggcttagcccttagagttttagtgatgaaaatttttagttcatattttctttctgctttatttgggattttgtctttattttgaatacttacaaatgaggaagatttgtagagtagaaatgcattattttctagaaccaggcttttctccattttttttgtgtctctgaaagacaatcattattatatggttgattcaagtaaaagaataccattaacatgtacagacatgtacagtgaggttgcttcttatgaaaaaaaatactttggtgtctgtctcttatttccttgaatagtgcaagttgacgtcctttgcatcagtataccgggtctcgtactgtgccaagtgctatttaatgtaccaaaaagggagagcattcttcccttaccatttgctgacgagctctttgggtcctactggggagtggtggaaagacacagtgctgttttactcaggtgtttgcagtatgccttcctaggggggacttccagttaatctaattacagaagtagcgaggggaaactttctaaatcagtgtaaatgttgtagcttattctaaatgaaagaatggcagtaggtatttaattatttgggagactgtcaagaggtgcacagatgctcagattggtttgagtgccctttgctattctcagatgactctgtgtttttataataaaataaactgtacttgtttattcatgcttaattattctgaagggccgtgatgacctgagacaagatgctgtcatgcaacaggtcttccagatgtgtaatacattactgcagagaaacacggaaactaggaagaggaaattaactatctgtacttataaggtaactatttgtacttctgttagttcaccaaaaacatataaaagatgccatttggttgggtgaagtggctcatgcccatattcataatgctttgggaggccaaggtgggaggattgcttgaggccaggagttcgagaccagcctcagcaacatagtgagaccccatcttgacaaaaagttaaaaaaaaaaaaaaagccagagatgatggcatgtgcttgtagtcccttagctacatgggaggctgaggtgggaggatcacttgagtccaggagtttgaggctgcagtgagctcaaactctgcagtgagccccagtccagcctgagcaacacagcaagatcccgtttaaaaaagaagaagaagaagaagatgccattatttggaccaggagtctacaaatgttttctgtgaaggaccaaataataaagatttattttctttgtaaaaagtatttattaatgttaattatagttaggtgtttcttatagtcaactgaagtattttttccttttttttctactcaacaatatgtcacagaaatctttctcattttttaacagctgcattgtgtgtatgtatgtagttttttatacaagtccttatcgatgggcatttgggttgttttcagtcttttgctgctacaaacaacgctgtattgtagtgaataaccttgaacatacaaatttcatacatgcgcaggcaaatctgtagcatggatttccaaaagttggattgctgggttagaggatacatgcatctgtaatctggtacatattgccaaattactctcaatgggagtgtacccacttacatttcctctagctatttgcctgagaagacaatcctcagtcacattctatgagctgatcatctttgactcttatattaattattcatttaaccagtttagaaataacaataaatccttattttgaagggcctattttccataggtttgtcttttgtgatttcattcctgtacctcatttttaaactttctccttctataaatgttgtaacagggactatgggtgacatgtgcttttttatatatttctagttttccactatgaacgtgttttatttttaaaataatggctaaattaaaagccctaaataggggagtgaagaagaataaattagatctaccctccaaaatgctgcttgagttaggctattgtaataaaaagcagaacttggttttgagcttcttaactgctttcagagactaaatataaaacttattggttgagagaggggcatactgttcattaaggaaagcacaattttttccgtagccttcaagtttgtgagaaatttgtgacatggaaccttctgcaataataactaacataatagatgttttccattagcagtttaaaaagctaattaatcctcgatgaatgcaaaaagcaaaagttgctctataaaggctactctgtagagggatttctttgatgtggttaagatcattggtactcaagctttagcagacatcatagtcacttagagagtttgttaaaaacacagatttctgatccccattcttagaatttctaattcagcaagattagggtagaacctgtgaatgtgcgtttctagcaagataccagttatgttgatgctgcactggtccagggacaacactttgagacccaccagtctacttgttctaccatctattgacctgacttcattttagaacaaagttgatgatctattagctatctcctatctgacagataatgtagagattgctaagaagtttttagagactagatattctgtaatgtgaatgaaaggaaattgtttatgctctaaataccaaacttttagatgacaaagataataggtgaagaattgggttacaaaagtatgggctataggagcacctcctgaactctcagaaagtagctaagatttccaagcagatacacaattgaacctccaaagttcattgctgtaaagcacaaaaaagcaaatgcctgacctagaatatcttgaaagcagaaattactgaactttcatctctaccttatgactttttcaacagctagttttcacacaaaactattttaccatataagttattccattaagatttctagccgggcatggtggcccacgcctgtaatcccagtacttcaggaggccgaggtgggcggatcacttgaggccaggagtttgagaccagcctggccaacatggccaaaccccatctctactaaaaatacaaaaaaattagccaggcgtggtggcacatgcctctagtctcagctacttgggaggctgaggtgagagaatcacttaaacccggatggcagaggttgcagttgagccgagatcacaccactgcactccagcctgggtgacagaccgagacttcttctcaaaaaaggaaaaatgtctagaggccagatgcagtggctcatgcctgtaatctcagcactttgagaggccaaggcaggaggatcacttgaggccaggagtttgaaaccaacctgggcaacatagcaagacctcatctctacaaaaaattaaaaatttagccaggcatgatggcatgcacctatagtcccagctactcaagaagctaaagcgtgaggattgcttgaaatcaggagtttggggctgtgcatgagctgtgatcatgccactgcagtccagtctgggcaacagagcaagaacttgtcttaaaaaaaaaaaagtggggttggggggtaacccagataattaattatttaatgttatacatctcaatattaaagtaaaacctgtaaacacaacagtttaggtttgactatttcttagaattacgacaataagccagtaatgttattttgagattactccaagaatgtgaaagttgtgtcatcattatgttaaactaagtgttcttgcctttagttaaggttccctagactacagcgaagtagtctacccagtccagtcatctgtagagtcattcccaatcctgagattcaggtcttctgtggtcattgtgtcaacaagagcatacattgactacctggaactagatcttggtatacaaaccttgtgtcattgtgcaacctcaaaaggagagacttgtatattgaggcatgccagatatctcttgtcagagagaatcagatggaaatgaagacagttcttattgtgtatgttgatagctcagacatagcccttaacattaaccagaattagggtggctggccccatttttctccaccaaaactatgcattgttacaaagtatactgaacaagtctaaaatcttaggtgtcagaggatttgttttctaaaaggcaagtctctaataaacaatatttaagtgctgaaaggagctttgcacttaacctgatcatcctgccttgtgccaataaataatttttattccttgtcatgcatatttcagagcatctgtctcagtcatggttctggggagagaagccataatatcttaagacattcactgaatataatgaattaacttcatttctgtgtatctaggatgatatcagctgtgtactttcagagaactgagaaaatagtcatcagtccttttttgtggcattcacacaaaatacccagatacccagttgaaatcttccagagagtctttagtaccagagaaaacactgtcatttgctttttgaaattcaaattcagctctttctccaacaaccaacatcacagttgagactctaagctgaggtagaaaaaagccaacccattcctttctgtatcaatctctcaacaaaaaataagggtttgattccccctccccgccccagagctagatattgatagagagtaatcaatgtaaaagagactttagacagagtacactacactgcaagaatgttaatgtgatcaagcatcaggggtcacagctaactcaaagacagcaggggagagggcatgtagaatacttattaggcaggaagggaaatcagaaaggccatgagatcattcatttgtttattcaataaatgtgaatttatatacctacgttgggttagatactctactgagtgctaggtctatagaagtagtaaaacattgccctagtccttaaggtgttcacattctaatagggaaaataaacataataaacataattataatgcaaagtgtattgttagagatggtaccaccttcacttggttgctcagactgaaacctagaggctttattttctttttacttttattattatggaaaatttcaaacatacaaaaggagacaataacatcatgaacccccttgtacttgtcactcagtttcagcagttaccaactcatggacaattttgttccatttctctttccaccaacttccttccaatattattttaaagcaagatgtcatatcatttcatctgtaaacatttcagtgtgtagatctgtaagataatgtctgttttaaaaaaccattctcacaatactgtcatcactcctaaaacaattcacaaaaattcctaaatgtcaccaagtaatgggagtcattttaaactcttgtttctctcttctcaagtcttgtctattccatcagcaagtcctattggtcaacttccaggcaggtcactttaccacccctgctattaccaccctacttctgcagtcacatctctgtagatactagagtttaaaccaacagtttacttctgctcttggttttccaaagctagttttattaataactgttagagtgatccttttaaaagtgtctaagacagagtactcttattcggtatctgtgggggattgtttccagagccccctgtggatactaaaatcaagtcccttatatacagtggtgtatgaagcatttgcctataacctatgaacctcctcccatgtactgtaaatcatctctgggttacttaaaataccttatatagtgtaaatgctgtgtaaatagttgtactgtattggtttttaaaatttttattttttattgtattgtttttattgaggtttttttggtgaatatttttgatccacagttggttgaatctgcagatgcagagggccagctgtattccattttcctgttcagaaccccacatgagttcacattatccctgaatgacaattctctaagttaagtgatctgcctctgctgttctccctccagccttatctaccactctcctcacactcctctcactttctgcttgtatagatgagtcatctccacctgacttacctggtcttttgcaattgcttagacacaccaatttgtttctgcctcagggcttttctgcttctgcctgcaatgcttttccctcagatcttcacaccagtcactcccttacttcattcaggcttctgctgcagtgttaccctcagaaaggcctccgaccatgttgccattacccactttctctcttttttaaacttacgttttgttctcttatacttattatctaatattatgaaatgtttattaggatatatgttcctcaccagaatgaaactttatgagggcatagtcttcatctgcctttttcccactctgttctcagtgccctagccctgtgtgtaacatgtaatacgcccccaacaaataaatgttaataaattaatcaaatgcttccttaagacacaaaacagttcaacatatgtgagaaacttaaaatttaaaaatgtatagaactaaagacaccataaggacgagtgaccagctgagaaaacgaatataataatgttaattagaacaaaaaggatcattttaatataaagaacaagggatttatatgaagaatacaatgatattcaacttttctagtaatctggaaaatacaaattaaaaccacagtgaaatactattaccctcagattagcaaaatataaaaagcctgacaatattaagtattgcgaaagttatggaataactctactggtgggtatataaatcggtacagtcactttgaatagttatttggcaatatctggttaaccgaggtgaagatgtatctctggctcagctgttaaattcctcggtatataccctagagcagacttgtccaacccacagcctgcaggccacatgcagcctacaggatggctttgagtgcagcccaacacaaatttgtaaactttcttaacattatgagattttttttgcagtttttttttcttttttagctcatcagcaatcattagtgttagtgtattttatgtgtggcccaaggcaattcttccagtgtggcccagggaatccaaaagattggacacccctgcctagagaaactgaaatatgttcacgagtagtttatttcattgcagcagtatttcatggaaatgtggaaacaatgtaaatgttaatatgcagattggataactgttgtatttatgtagtatatagctgttaaaatgaatgatgtagagttaaatatgctcacatagttaggataaaatagtattgaataaaaaaccaaattacagaaatatacatatagtatcctaatttttttacttaatacttacaactatttgtgtacatatagctttgaaataaaaatataccaaaaaatacaagaacatgataaaccagctaacagtcatcttgatggtgggagggacttagggtcagtgaagcacacaagggggagcttcatctcttccccagcaaatgtgagaaaatcctagatttgataaagctgtttaatggataaaagggtatctgttaatatcattttctatactttatgtatgtttataatataattttaaaaaactttcctagtaaagttgcttattttatatttaggagtacattttctctctgtgaagataataagactaaagcaagagtacatgtaatttcaataatgaagttacactaaaattgagaccacattcatgggtaataatttccaagtgaaactccccaaatttaattgatactaaaattttaaggaaagcagttaattcctctcctaactggacaaactaagtatggattaatgacagatgacggtgagtatagttaacaggagtgacctctcagagaatcgtggggattgagtgatgggcaggctctcaaacatctaggcagcaggctggaaaattatattctttgagcttaagtttatttccgattggtttcctccaaggagctttgtcttctatggacagagaaatattaatacaacttgaaaaaaaatgctttgcactgactctgatagctgaatgatcatcaaatgctctttaatggccttttaaaattaaaaggtatttaatctgtaactccaggtggttcccctctctcagcgaagtggtgttcttgaatggtgcacaggaactgtccccattggtgaatttcttgttaacaatgaagatggtgctcataaaagatacaggccaaatgatttcagtgcctttcagtgccaaaagaaaatgatggtgagtgacacccaaaattaaaggttattgtaagattatttaatggcttattaaagctgacagctgtcagatattatagaatacaaaaaaactttaatttcatcaggtaattgtcaaagatactaagtaaaagaaaaactcatcagaatgaaagtgtgtgagtgaaaaaggaaggattttaaactacataatatgtcaacccttgtcagataagaaatgtaaaggttattcaatgtgtgctgatttgttttcaatttgggataaactaattcttagcaaacaaaacactaaaatgccaggcacgatggcatgcacctgtaatcccagctacttgagaggctgagtctgggggatcccttgaacccaggattttgaggccagcctgggcaacagagcaagaccccatctctaaaaaacaaacacagtaaacaacaacaacaacaagattatgaagtaattttttatgaaactgatatagaaaaccttctgagacatttacaatgtcacattggccatctagtctgatattcattcgctgaatcagcaacatttattgtatgttttctgtctaccaggtactgtgctgacttaagacttcacaaatatcaaatattacgactaatcatcataatccttatcctcattttaaaatgagaagttcagagaacttgcccaaggccagtgagctaataaacagagcaaggatttgagccttgtctaaatccaaaatccatttattgttcattttattgtgctttctgtgacatgttttttaaaatgtgtgataagtgctataggtgttgtgatggaagtctgtacagggcacacagggtacagtgtaggtatggaggaggaagtgcttagttctgcctggggtggggagaatagacagaagtagatccaagaaatgcttcacagaggaaaaggtgtgtgagccgagttttgtaaatgagttgtttttccaggcagaaggagcatataagcaaaggagaggaggcatgagcaggaaaagacaacataagcataggcttagtgtttgaggaagaaaagatgagattggagcagtaattgttggtcaaaagatggagtgttgctttatgaaatgcaaaggagtttgcaccttatgctataggcctcataagaccctaaaggatagtaatatcagacttgcattttagaaagaaattccgacggcactgtgggttctatttttgagaatgcaaactggaggcatgagatggtctgaactgagatgaacagcagtaggaagggagaatcgtgggtagagatgagaaatatgaaggaggcagaattcataggatttgattgctgattaaaaataaggttggggggcgggtgtggtagcgcatgcctgtaatcccagcacttaaggataccaaggcaggaggattgcttgagcccaggagtttaagaccagcctgggaaacatagtgagaccacatctctacaaaaaataaaaagtcagccaggtaatggtggcacatgcctgtaatcccagctactcaagaggctgaggtgagaggattgcttgagcccaggggccaaaattgcagtgagctgtgatcacacccctgcactccagtccaggtgacagagaccctgtcaccctgtctccaaaaaaaaaaaatgttggagaaaaggagtagccagtgcctcccagttttctgtttggggcagctgggtagatggtgaagctctttactgcattgaagaatagaagaggtgactaaagtttgccagagatgaagtatttgaatttggaagtgatccaagtgaagatgctgaatgggcagcttgagaagcacattaagctaaagcttaataaagatatctgggccaaacagatttagaaatcatcagcacatagatggaagggagttgaagtcggtaagctttgcttcaggtagtattttatggcaagaagatgttggaggatagagatctgagtcatatcagctgccatctatgagggattcttctgttctttctcttttcctgttttctattgcaacccaatgctgtgatgccacctgaggttatctggaactacttaggcatttctgtgtttatttctgcttaagagtacaggattattcaaattagaatttaatcaaaacaagtaacagtcactgtaggtgtgcttcctcccccaacaattaatatggaaatcctaaagggattatcacttgtaattaattgcttccctgtccagactgttagcttcttgtaggtaatgtatcctgttcatctttattgcccctatatctgtcatatttttatataaaaatgtgtatattagtttaattgaacacaatattgaaaaataattatatatattctctatttaaaggaggtgcaaaaaaagtcttttgaagagaaatatgaagtcttcatggatgtttgccaaaattttcaaccagttttccgttacttctgcatggaaaaattcttggatccagctatttggtttgagaagcgattggcttatacgcgcagtgtagctacttcttctattggtaatcttcttgtacatatagtagattgagcactttgttgtttggcaggttttatttttgtttgattcagcactttttctacattctgagttgcagggggatgatagtgatgatgtggttagtaaccaacccatcttcattattaaatcatatgtttcttgttcatcctgattcttagtgtctacctttttataacttatgcagaagagaattctcctacttcaataaataataaaaagacagggttttcttctttgttttatagtgaatatggcatattttctctcctctcaatatattattttctgagactttctttggaaaataatgaaacctgtgataacttatttcctttaattatttttgttcttttgcatataacctctaaatatcatcacctagtgattaatactgtttaatagaattttgttttcagaatagaaaccatgagatatatttaaatattttgtgtacaatatatattttgactttttttccctaagaaattagaataggtagatagtatggttaacaaaatcctagagtatgagaactaatgtaaacattagagatcatctaatctatttgttgttttttttttttttaactaaagacaactccctccatcacttacatactataccccaggaaggcagggcatgtatgttttgaaagagttcccaggtaattgtgaaactctcttctacatagagaatcactaatctgatacaactagtttataaacaagaaagtaggcctagttaatgacagagcaagccagacacccagtcattctgattccctacccagtgtgtttttttgtaatgccatgtgatttctcccattagtgcatgtcatcatctgtcttaaatacagaaatgcagttttttggggggatacacacctggtgaaatgaattaatgattaatttgtgttaaatataattcatcaaggagaagaaagtttcactgaagagtgaagagtttatccatagacttctcattttataagtatgttcaataaaaatttgagtacatataatgcacagctttgacccaggtaaataatgggtctcaactttagccacaataattttttaagtactaatattttaaaatgtgtgcctattagtaaagagaaaatttttttagcaaatcatctaggatttgtaaaatgcaatatgcattaaaatagctggcaagatttgagttaaactcaacatggccggttatgcacatcatttaagtaggctaaaaatcctaaactacttaaagattataccaagtcagtggtcttaattgaaattatggctatatattagaaagagatggaatcagtgatttcagattgtttgtttcttttttctccagttggttacatacttggacttggtgatagacatgtacagaatatcttgataaatgagcagtcagcagaacttgtacatatagatctaggtaagtaataaaatctatgtatctattctttttagtaaatatttggtcatcatggaatgttgtttgcctaccaagatattacaaatataagagacagataaatcgaagcagtaaatattgggtttttttgttttcagcataaacagttgtcctagaagaaacagttaactctgcctggggtactgagtgaaacttaatagatgaggtgtcttttgagcctggtcttcaagaaagaaagaaagcataattcagacagaagatagagcagattcaaaagaaggaatcagggctattccaccaaaacaaggagtaattttaagatgtagcatgttgtgggagtggtgagacattaaatgtgtctggagtgaagtaagcctgtagttgagtcgcttgagagagagattggtactagactgtaaaaagccaggctaaggagtttcaacttcattgcattaaactataggaaataaatgaaggacatgataatattttattttcagaaatataatttcaggagcactttggggagtggtattggcagcaggaagaaaaattaagggatattgtaatagtttagatgagaaatgatgaagatttatactaaagttgtagaaaccagaatattggatttgagggacatttttgtagtaaactgtaccagtgatattagatgaggaaatagtgggggagtggggcccccagataactgaagcttctaactaaggaatatatcaagttttgtaaatagtaagaaagtgatgaatttagttttgctcattattttgaagtattaatggaatttctaggtggaacagacagtttaatatataagaaagaaagaatatatagcttctatgtatatatatagacagtttaatataaaagaaagagaatatatatagctaaggaatatatcaagttttgtaaataataagaaagtgatgaatttagttttgctcattattttgaagtattaatgggatttctaggtggaatagacagtttaatatataagaaagaaagaatatgtagcttctatgtatatatatagacagtttaatatataagaaagaaagaatatatatagctaagaaatatatcaagttttgtaaataataagaaagtgatgaatttagttttgctcattattttgaagtattaatgggatttctaggtggaatagacagtttaatatataagaaagaaagaatatgtagcttctatgtatatatatagacagtttaatatataagaaagaaagaatatatatagctaagaaatatatcaagttttgtaaataataagaaagtgatgaatttagttttgctcattattttgaagtattaatgggatttctaggtggaatagacagtttaatatataagaaagaagtgtgaatgtaatgtaaagaagtgtgaatgtaatgacaaaattctattaaacagtattaatcactaggtgataatttttagaggttatatgcaaaagaacaaaaataattaaaggaaataaattatcacaggtttcattattttccaaagaaattctcagaaaataatatattgagaggagagaaaatatgccatattcactataaaacaaagaagaaaaccctgtctttttattatttattgaagtaggagaattctcttctgcataagttataaaaaggtagatgctaagaatcaggatgaatatgaaacatatgatttaataatgaagctggtttggttactaaccacatcatcactattatccccctgcaactcagaatgtagaaaaagaagtgtgaatgtaatgacggagatccagaatcttcagcaaatagatttcagttgaagtcactgggctggaggaggttctgatctcacacatcatccgtgataaagagacctaaagatgaaatcataagggaagtgagccttggaaaggctgagccagaaaaaaactgagaagtactcaaaggaagtcaggatcttggaaggcaagaggggaaaatcttttatgaaagaagtagtgctcaatagtatctgatacagaaaggtcagagaggatgaatgctgaaaatagacctttgaatttaacaagtaatcaatcctagaggccttggaagtcccctttggatagaatggaggaaaccatactgtaaaaaggcaaggactgaatggaagttaaggatgtgtagattaagaatgtggaatctgccaggcgcggtggatcacacctgtaatcccaacactttgggaggccaaggcaggtggatcacgaggtcaggagattgagaccatcctggccaacatggtgaaaccccatctctactaaaatacaaaaaattagccgggcgaggtggtgggcacctgtagtcccagctacttgggaggctgaggcaggagaatcacttgaacccaggaagcagaggttgcagtgagctaagatcatgccactgcacttcagcctgggcggcagagcaagactgtctcaaaaaaaaagaatgtggaatcttcctacaagaagtttagaagggaagggaaggatggcagagaaatttgctgcaggaatgagagacacatttggtccttgcttttttaagataggagaggtttaaacctgttagatattgaagatacaggagaaaaacaaaagataattgaaatagcaagggaaatcataaagtacgtgagtctgatagcattggctttagattggaggcatgttagcttttctgctgagagagaaggaaaagtgatgctaataggaaagtcttaagctggagaggaaggagtatgagggaattatatttgctattgtgtttttgctgagaaatagaaagcatgctcatttgctaagaattggagggatggtaactggccttaaaagaacaaataaaattctaaaatttaccatggaaatgagaccaagacctgactagaaagggataaataaataagacatgccaagcagtttaaggggcactttcaatcctaaatttgtagtggagccaatagggttgttgtatgattttccagcagtcctcaacatccttggagcttaagttgtagtttaaaatgggagatgtggtggagggacaaggggacaaggagatttgaagcactgatgagagtaatcaaacttattgtctctacccctgggctgagttagggaaagaagagggctaataaactagaaatctccgtcaaatttgaagactgtttagtaagaataaggggtagaaggagaagaggttttgattagaatgtacaatttacaatgtctaagaagcagttttagcagactcatttctggagtacaacccatatgagtggttcattaagatagaatgaaattgaattccattagaacagagacagtcacggatattatatggttttccccagaatgaattctagagttgggacagaggggaagattgtgagctaggtccatgccaacattcagcgaatgtgagagaaaaccttacaggtttacagagtaaacgtgaagatggaagggatttgttagagctagaaggtggggatctcaacagaggagccagactttatctgagaatgaaagggcagtggtctggaagacgcaaattagaggtaggagtatgccaacctgagtccattcaggtcgtgctaaaagcatctataaatgagaagggtaaattggtacaacccctttggaatattgtttggcattatccactaaagctgactttatgtatatcctgtgacccatcaattccactccaacagaaatgcatacatatgtataaaaatgtttatagtagcattattcataatagcccctaactggaaacaatccagatatccatcataggtagaatggatgaacaaattgtcgtatatttatattctctttgtatataatgagattgaatgaataataacacacaatatagaagactctcacaaatataatgctaagtgaaagattccaacataaaagagtacacatgtataattccatttacataaaattcaaaagctgataaaattaatgtatagtgttagaaatcaggatagtggtgaccctttgaaagaggtgattagtgactggtaggagggactgaaagggggcctctggaatgctggtagagttctgttaacgtggatttgttcactttgcagaaatcccagtgagtcacacttgggtgatttgtatactattctgtgtatgtctgtttggttacctgttgctgcataacaaaccaccccaaaatttagtagcttaaaatcacaatttatttattattatctctcatagtctgttgactgggctcagctggacagttttcacttaggatctctcatgcagctgcagttagcatctggggctggagttatcttaagactcagctgggccagagttcatgattgcttcttcacttacatgtctgatgcttcagcactcccatgtggcctctctgtccacaatagtgtcctggacctactcagcatcttggggctccaaggggaaggaagtggaagttaagggctaggcctgcaacttgcacagtatcacttccatcacattatgtcatcacatagtcatgtcatagggtccatcctggttcttccctgtttctgggactccagtaaccctatgttaggcctttgcaatgtatcatttatactgttacctgctagtctatattttctaacctttttttccttttttctgactcactccttggtgtcagtggacatatccggggaacctggactttcagccctactcagctatagcaagccctttccctattgagtgtcagtggaggccaattggggaatctagtcttctgcccttacctagcagtaacaaggtggtgactcccaaaggcattaaaggcagaagtttaaggaagatactgagtctcgtaataactaaaaggtgtaggtgtcaattgaaaatcattaggcatacctggaaccaggaaaatctcaactttaatgaaaaatggccacctgtaggtgccaacactgagatgacaatgatgttggaattatctaagattttaaagcagccatcataaaaacactgaaggaacaattacaaacatgcttgaaacaaattaaaatatagtaagtctcagcacagaaataagtagtctcagtatagaagtagatataaaggagaaccagatggaaattttagaacagaaaaatatagtaaataaaataaaaaatttcaactgcagaatgaggagacagaagaaattatcagtgaatagaagacagagccgtagaaattacccaagctgagcaacagaggaagaaaattaagaggaaaccttcagcatctagggctaaacagagttcctagacttgataccaaaagaacaatctttaagaactctcaaaacttaacaacaaaatctacttataaaatggccatgtactacaaatgtgtatagcagctttattcataatagccaagaaccggaaaaatccagatgtcctacagtgggcaaatgcttaaacaaactgtgttacatccatgccctgaaatactactcagcaatgaaaagaaacagaactattgatatacataacaatttggatgaatctccagagaattaggctgagtgtaaaaagctattcccaaaaggttacatactgtatgattattccacttccatttatataacatacttgaaatgacaaaattataaaaatggagaacagattagtggctgctagaaaaatagggggtcagagggctgggtgataggctatgggagggaaataggtgcagccgtaaagggcagtatgaaggatccttatgataggaatattatatatcttgactgcatcgatgtcagtagtagtatagttttgcaggacattacagttggggtgaaatggggaaaaggcataagggatgatcttttctgtatgatttcttacaactcgaagtgaacatataattatctcataaaatgtcattaattttttttttttgatggagtttcactcttgtcgcccaggctggagtgcaatggcacgatctcagctccatgtatccttcacctcccaggttcaagtgattctcctgtctcagcctcccgagtaactgggattataggcacctgctaccacacccagctaatttttgtatttttagtggagacaaggtttcaccatgttggccaggctggtctcttaactcctgacctcaggtgtcaggcctcctcagcctcaaggtgctgggattacaggcgggagccaccacacccagcctaaaaattttttaaatataaatatatcatctccattttaaattataccagtagttacttcatttttaaaaatcaccctttaacctagatttctctagttgggttaagaagtagttaggttatttggatttgaggtggatctcacagacagtgacaaagatgaggaaggcagccagagcagaagtaaactactgtacatactagtgttcatagaacgtaggtaacatgtggtttcttgcctttgtaaagttcacattctaactggaaagaaagtaaattagctgtcaaacctcctaacttcactgtattctttactttaggtgttgcttttgaacagggcaaaatccttcctactcctgagacagttccttttagactcaccagagatattgtggatggcatgggcattacgggtgttgaaggtgtcttcagaaggtaagtgatatgaagtaaaggagggaaataatttttgatgtcaaaattacatgggctgggcatggttctttgcacctgtaatcccagctactcaagaggctgaagtgggaggattgtttgagcccaggagtttgagtccagcctaggcaatacagcaagaccctgtatctaaaaaaatacacacacacacacacacacacacacacacacacacacacacacacacacacacgggttagagatttgtatagattatagaatttagtgctagaatcgtattccagtgccttatcaatactaaggaaaagaccctgggtaaaagcaataatagttcctcttccttccacccacctgggacctaagcccatgtaacatacatactgttattccaaacctcctctggaagcatcccacctttacttttaacacctctatcctggctgactccttcttaatgatccaaactactattgggtgctcatcactgtgcatatagaagagactacatttttatttataggagcttgtgttctagtataacattgtgctactaaaaaagctttgcagttccttgtagttttcccagcataggtctgtgtactcaacttggattggggcagattgcagtcagtgtaaactaataattgccacaataatcaaagactgagagctgagcccagtggtgcatgcctgtaatcaatagtgttgtgttattcttgtaaatgccaagcttgtgaaatagtcaaatacatatttgtattcatttcaaacgtctaatgaaagcccactctgccaagtattatgctattttgagatacagatatgtagattattaagcataggctcagcatactacacatgagagtatacagataaagatatgttgacaacattggtgtgtaacaaaatccgtatttataatgtgtttgactctagatgctgtgagaaaaccatggaagtgatgagaaactctcaggaaactctgttaaccattgtagaggtaaagtattttataaggaagactttattttttttcttaccaggtagactgtgtatctcgtcaggaagtcactgatgtgaagagcactgcttcattttaacatagggggatgtggctgggcagcagaaaggaggagattgtgcacttagccttttcacacatccaaaaatactggtttagaaatgccttcagcccccttgagtttcttggaatgttagagcattgtaagtagtctctagttttcaattcataaatcaattctttgacatttagatattccatatggtattattattttcagaatggtttccattagggtttaagaaaaatcagaaatttatatctcctttttccctgctcaggttcagaactaattagtcagacaaatggagatcaaattgtcagcatcattactagaggaacgtggcttaggaatgagggccagactagtttactgctggtgctacctcagtacctctctgctgtcttaactttgggacagctcacctgaatagggtttgggcctgcagagcaaacacatgtaatcaggatcactgccttgtcttgatccagggcagaaaaaaggaagtcaaacaaatttcagtgtctgtgctgttagtacctatgccagtcattcaccaatctggtaagggtatgtgagacaagaaatcaggagtgtggcctccccagggaagcatggcaggtagagtgcagtatgggcttgccacttttccactactcagcttttcttcctttaacctgatttatgttggactggctgcatgttagtattacttttactgcatttaaaaaacattgatgctgatcaaattcaaaccaggtttctagagatggggcaggaatatgtgcatttttaaaaatctctcctactgttcaactaggatatgagaactgtcttaattcattggcattaaccattaagcctgtggtcaataagggtggggctttatcccttggaagatgagtaacagtccatcagggtggtcctgtgtgcacctttatgaaccgaggcatctttatagatctcctttggactgcagatggtaatacagattttgctacaaggagtttgctgaaataggtcccaataatacgttggtaaaattaaatccaaggctgtgctattcccaaggttaaaaatacattcttttttcttttaccgatttcaaattctgttcatacatgttgtcatttgttacagtttgccattggttctgcagtaagaataaatgttaagaaaataagcatgatgtgtaacattttaaaaaaataatacatggtaacatggatgcctcaataatgtcgaaattaaactctaaagttatattatcttgcactttttcatgtaagaaaaagagggctgggcgcggtggctcatgcctgtaatcccagcactttgagaggccgagacaggtggatcacctgaggtcaggagttcaagaccagtttggccaacatggtgaaaccccgtctctaataaaaatgcaaaaattagctgggcgtgatggcgggcacctgtaatcccagctactcaggaggctgaggcaggagaatcgcttgaacccaggaggtggaggttgtagtgagctgaaattgcaccattgccctccagcctgggcgacaagagcaagactctgtctgtcttaaaaaaaaaaaaaaaaaaagcccaaacttttcaaattaaagagtcaaagcagcttaacatattctttagtattttactctacctagtttcagtcagaagggatttttatgctaaggtggatttgggagtttcttccagtacttgtatcctacctaacactcaccagaagaaggtagttcttttagggcctcagaaatcttactagtttaatgccaaactgcttatggacttcactttttagagtagtaggagatcaaatgagagaagtgacagtggccagatcctttgccattgtaaggactttggatttcctttgagtgagggttttgagtctgaaaagtgatttgcatctccacctacaataactgtcacctttaaacacaccctccgggaggaggagccaagatggccgaataggaacagctccggtatacagctcccagcgtgagcgatgcagaagacaggtgatttctgcatttccatctgaggtaccaggttcatctcactagggagcgccagacagtgggcgcaggtcagtgggtgcacgcactgtgcgcgaactgaagcagggcaaggcattgcctcacttgggaagcgcaagggtcagggagttccctttcctagtcaaagaaaggggtgacagacggcacctggaaaatcgggtcactcccacccgaatattgcgctttttggaccagcttaaaaaacggcgcaccacgagattatatcccgcagctggctcggagggtcctacgcccacggagtctcgctgattactagcacagcagtctgagatcaaactgcaaggtggcagcgaggctgggggaggggcgcccgccattgcccaggcttgattaggtaaacaaagcagcctggaagctcgaactgggtggaacccaccacagctcaaggagacctgcctgcctctgtaggctccacctctgggggcagggcacagacaaacaaaaagacagcagtaacctctgcagacttaaatgtccctgtctgacagctttgaagagagtagtggttctcccagcacgcagctggagatcggacaacaggcagactgcctcctcaagtgggtccctgacccctgacccccgagcagcctaactgggaggcaccccccagcaggggcacactgacacctcacacggcagggtactccaacagacctgcagctgagggtcttgtctgttagaaggaaaactaacaaacagaaaggatatccacaccaaaaacccatctgtacatcaccatcatcaaagaccaaaagtagataaaaccacaaagatggggaaaaaacagagcagaaaaactggaaactctaaaacgcagagcacctctcctcctccaaaggaacgcagttcctcaccagcaacggaacaaagctggatggagaatgactttgacgagctgagagaagaaggcttcagacgatcaaattactctgagctacgggaggacattcaaaccaaaggcaaataagttgaaaactttgaaaaaaatttagaagaatgtataactagaataaccaatacagagaagtgcttaaaggagctgatggagctgaaaatcaaggctcgagaactatgtgaagaatgcagaagcctcaggagccgatgcgatcaactggaagaaagggtatcagcgatggaagatgaaatgaatgaaatgaagcgagaagggaagttcagagaaaaaagaataaaaagaaatgagcaaagcctccaagaaatatgggactatgtgaaaagaccaaatctacgtctgattggtgtacctgaaagtgatggggagaatggaaccaagttggaaaacactctgcaggatattatccaggagaacttccccaatctagcaaggcaggccaacgttcagattcaggaaatacagagaatgccacaaagatactctttgagaagagcaactccaagacacataattgtcagattcaccaaagttgaaatgaaggaaaaaatgttaagggcagccagagagaaaggtcgggttaccctcaaagggaagcccatcagactaacagcggatctctcggcagaaaccctacaagccagaagagagtgggggccaatattcaacattcttaaagaaaagaattttcaacccagaatttcatatccagccaaactaagcttcatcagtgaagtagaaataaaatactttacagacaagcaaatgctgagagattttgtcaccaccaggcctgccctaaaagagctcctgaaggaagcactaaacatggaaaggaacaaccggtaccagccactgcaaaatcatgccaaaatgtaaagaccatcgagactaggaagaaactgcatcaactaacgaacaaaatcaccagctaacatcataatgacaggatcaaactcccacataacaaaattaactttaaatgtatatggactaaatgctccaattaaaagacacagactggcaaattggataaagagtcaagacccatcagtgtgctgtattcaggaaacccatctcacgtgcagagacacacataggctcaaaataaaaggatggaggaagatctaccaagcaaatggaaaacaaaaaaaggcaggggttgcaatcctagtctctgataaaacagactttaaaccaacaaagatcaaaagaaacaaagaaggccattacataatggtaaagggatcaattcaacaagaagagctaactatcctaaatatatatgcacccaatacaggagcacccagattcataaagcaagtcctgagtgacctacaaagagacttagaatcccacacattaataatgggagactttaacaccccactgtcaacattagacagatcaacgagataaaaagtcaacaaggatacccaggaattgaactcagctctgcaccaagcggacctaatagacatctacagaactctccaccccaaatcaacagaatatacatttttttcagcaccacaccacacctattccaaaattgaccccatagttggaagtaaagctctcctcagcaaatgtaaaagaacagagattataacaaactatctctcagaccacagtgacatcaaactagaactcaggattaagaatctcactcaaaaccgctcaactacatggaaaccaaacaacctgctcctgaatgactactggatacataacgaaatgaaggcagaaataaagatgttctttgaaaccaacgagaacaaagacacaacgtaccagaatctctgggacacattcaaagcagtgtgtagagggaaatttatagcactaaatgcccacaagagaaagcaggaaagatccaaaactgacaccctaacatcacaattaaaagagctagaaaaggaagagcaaacacattcaaaagttagcagaaggcaagaaataactaaaatcagagcagaactgaaggaaatagagacacaaaaaacccttcaaaaaattaatgaatccaggagctggttttttgaaaggatcaacaaaattgatagaccgctagcaagactaataaagaaaaaagagagaagaatcaaatagacacaataaaaaatgataaaggggatatcaccaccgatcccacagaaatacaaactaccatcagagaatactacaaacacctctacgcaaataaactagaaaatctagaagaaatggataaattcctcgacacatacactctcccaagactaaaccaggaagaagttgaatctctgaatagaccagttaacaggagctgaaattgtggcaataatcaatagtttaccaaacaaaaagagtccaggaccagatggattcacagctgaattctaccagaggtacaaggaggaactggtaccattccttctgaaactattccaatcaatagaaaaagagggaatcctccctaactcattttatgaggccagcatcattctgataccaaagccgggcagagacacaaccaaaaaagagaattttagaccaatatccttgatgaacattgatgcaaaaatcctcaataaaatactggcaaaacgaatccagcagcacatcaaaaagcttatccaccatgatccagtgggcttcatccctgggattcaaggctggttcaatatatgcaaatcaataaatgtaatccagcatataaacagaaccaaagacaaaaaccacatgattatctcaatagatgcagaaaaagcctttgacaaaattcaaaaacccttcatgctaaaaactctcaataaattaggtattgatgggacgtatttcaaaataataagagctatctatgacaaacccacagccaatatcatactgaatgggcaaaaactggaagcattccctttgaaaactggcacaagacagggatgccctctctcaccactcctattcaacatagtgttggaagttctggccagggcaatcaggcaggagaaggaaataaagggtattcaattaggaaaagaggaagtcaaattgtccctgtttgcagatgacatgattgtatatctagaaaaccccactgtctcagcccaaaatctccttaagctgataagcaacttcagcaaagtctcaggatacaaaatcaatgtacaaaaatcacaagcattcttttacaccaacaacagacaaacagagagccaaatcatgagtgaactcccattcacaattgcttcaaagagaataaaatacctaggaatccaacttacaagggatgtgaaggacctcttcaaggagaactacaaaccactgctcaaggaaataaaagaggatacaaacaaatggaagaacattccatgctcatgggtaggaagaatcaatattgtgaaaatggccatactgcccaaggtaatttacagattcaatggcatccccatcaagctaccaatgactttctttacagaattggaaaaaactactttaaagttcatatggaaccaaaaaagagcccgcatcggcaagtcaatcctaagccaaaagaacaaagctggaggcatcacactacctgacttcaaactatactacaaggctacagtaaccaaaacaacatggtactggtaccaaaacagagatatagatcaatggaacagaacagagcccttagaaataacgccgcatgtctacaactatctgatctttgacaaacctgagaaaaacaagcaatggggaaaggattccctatttaataaatggtgctgggaaaactggttagccatatgtagaaagctgaaactggatcccttccttacacctgatacaaaaattaactcaagatggattaaagacttaaacgttagacctaataccataaaaaccctagaagaaaacctaggcattaccattcaggacataggcatgggcaaggacttcatgtccaaaacaccaaaagcaatggcaacaaaagccaaaattgacaaatgggatctaattaaactaaagagcttctgcacagcaaaagaaactaccatcagagtgaacaggcaacctacaaaatgggagaaaattttcgcaacctactcatctgacaaagggctaatatccagaatctacaatgaactcaaacaaatttacaagaaaaaaacaaacaaccccatcaaaaagtgggtgaaggacatgaacagacacttctcaaaagaagacatttatgcagccaaaaaacacatgaaaaaatgctcatcatcactggccatcagagaaatgcaaatcaaaaccacaatgagataccatctcacaccagttagaatggcagtcattaaaaagtcaggaaacaacaggtgctggagaggatgtggagaaataggaacccttttacactgttggtgggactgtaaactagttcaaccattgtggaagtcagtgtggcgattcctcagggatctagaattagaaataccatttgacccagccatcccattactgggtatataaccaaaggactataaatcatgctgctataaagacacatgcacacgtatgtttattgcggcattattcacaatagcaaagacttggaaccaacccaaatgtccaacaatgatagactggattaagaaaatgtagcacatatacaccatggaatactatgcagccataaaaaatgatgagttcatgtcctttgtagggacatggatgaaattggaaatcatcattctcagtaaactatcgcaagaacaaaaaaccaaacaccgcatattctcactcataggtgggaattgaacaatgagaacacatggacacaggaaggggaatatcacactctggggactgtggtggggtggggggtggggggagggatagcattgggagatatacctaatgctagatgacgagttagtgggtgcagcgcaccagcatggcatatgtatacatatgtaactaacctgcacaatgtgcacatgtaccctaaaacataaaagtataatttaaaaaaaactaaaaaaacaaacaacaaaacaaacaaacaaaaaaaacacaccctccaatgctttgtgtattttacactcatctacctaatcttccctccgtaaatctgtccgaatttcccaaaatcatttggtgtgattgttccaatcttcaagaataattttcccagtgatcttaccacagtaagaccctttctgccttcagctttaggagggtgcttctcaattagcatcctggttcccagtcctctgggacatcatatctttcctctcttggattcatttcttttcttctcttagatttcattgaggcacagtcactatttctgaactgatctccccgcttcctaagcccctccttcagagcactttaacctgggtgtatttcccttttcttttcagtgtatttgtctctcctggccttcaagattttattttcttcctaatggaccattctctcctctaagattttatgtgttatgctaaggaaatatatctctccctctaactcagtgatgcttagccaagagcagttttgtcccctagaggacagttggcaatgtctggaggcatttttattgtcacaattggggatgggagatgaggatagtattggcatctactgggtagaggccagggatgctgctgaacacctcagaatgtacaagttagcccccacagcaaagaaataccccatccaaaatgacaatagtgctgagactgagaaaccctgctctagcttaatcagtctgtattcctttactgtttccaaccacttctgtcttgtcagactgaaacataattttttacttattccagttcctccttaattctaatatttgcaagtatgattcctgacacaagcccttggttttgaagtaatttagatttttcttctacttcaacccaagaaaaccatctagtctgtattagaggccttcattccttttcattagttcattaataaaatatattaatatttcccttttgtgggtgaaactggtttggatctctgaaatctaaagccatgtcagtgcccaacttgaagtcacataggaaaccttgaacttaacggacaagctacatgtaatcaagctcagtttctccacagtatttaatggtcctggaggacactcaaaacagcattaaaaaatagagcgattttggttctgctaatctagtacgtgtcctgaaactaaatctgctaaaggcattttatagtcccaacctgcagatttactgagaaactgtatacagatagcagcaaaaaagtgttccaaccttgtaatactggaatgccctgtagaatcattctttatattgtctccacttattactaagatttgtaagcatttgctaaagcctattttttttaaagttctgtgtttataaataccagagcagttagctgttctgaactgccaatatcagaaattcctcatgaactcactttctaaaatttacgacctaaagctacttgctctagccatgtcagttgttttggtatcctaattctacacctaatatatatctcaagattccaaacgcagcaccaaaccttgggttttgaggaggtttcaacaaattatacctttctggatccacccagatttagaactgagagaaaaagagccataggaatagggtggagatcagaatttcagatttgttactgataaaactattggagaagacggcttaggagtgaggtccaaataggcttgctggtgctctccagttcccacatcccaatctataccttgagacagcctgggctgaggaagaattgggccctacaaagcaaatacactaacccagggttaagagtagagagagaaggaaagaaagtgactaaccttttaatagattagtttcatccagtcaggaaacatgggtcaagggatgtcacccctaaccatggaggaagaatgaattcagaatgaaatgagaagcttggagcattatgctaggatagtttcctcaaggaaacatgaagtgtgcatgatgtttgttcccctcccccatcaactaccatgtgactggcttatttgtatgatactggttctactgtttctaagtatgtgattaaaatgtacattgttcttttaatacatatgttctctctgtttaggtccttctatatgatccactctttgactggaccatgaatcctttgaaagctttgtatttacagcagaggccggaagatgaaactgagcttcaccctactctgaatgcagatgaccaagaatgcaaacgaaatctcaggtgagcagtattttaagaaggtcctgttgtcagtttttcagattttcttattcccaaggcctttaaactgttcacctcactgaaacctttgtgtttttgtccttagtgatattgaccagagtttcaacaaagtagctgaacgtgtcttaatgagactacaagagaaactgaaaggagtggaagaaggcactgtgctcagtgttggtggacaagtgaatttgctcatacagcaggccatagaccccaaaaatctcagccgacttttcccaggatggaaagcttgggtgtgatcttcagtatatgaattaccctttcattcagcctttagaaattatattttagcctttatttttaacctgccaacatactttaagtagggattaatatttaagtgaactattgtgggtttttttgaatgttggttttaatacttgatttaatcaccactcaaaaatgttttgatggtcttaaggaacatctctgctttcactctttagaaataatggtcattcgggctgggcgcagcggctcacgcctgtaatcccagcactttgggaggccgaggtgagcggatcacaaggtcaggagttcgagaccagcctggccaagagaccagcctggccagtatggtgaaaccctgtctctactaaaaatacaaaaattagccgagcatggtggcgggcacctgtaatcccagctactcgagaggctgaggcaggagaatctcttgaacctgggaggtgaaggttgctgtgggccaaaatcatgccattgcactccagcctgggtgacaagagcgaaactccatctcaaaaaaaaaaaaaaaaaacagaaacttatttggatttttcctagtaagatcactcagtgttactaaataatgaagttgttatggagaacaaatttcaaagacacagttagtgtagttactatttttttaagtgtgtattaaaacttctcattctattctctttatcttttaagcccttctgtactgtccatgtatgttatctttctgtgataacttcatagattgccttctagttcatgaattctcttgtcagatgtatataatctcttttaccctatccattgggcttcttctttcagaaattgtttttcatttctaattatgcatcatttttcagatctctgtttcttgatgtcatttttaatgtttttttaatgttttttatgtcactaattattttaaatgtctgtacttgatagacactgtaatagttctattaaatttagttcctgctgtttatatctgttgatttttgtatttgataggctgttcatccagttttgtctttttgaaaagtgagtttattttcagcaaggctttatctatgggaatcttgagtgtctgtttatgtcatattcccagggctgttgctgcacacaagcccattcttattttaatttcttggctttagggtttccatacctgaagtgtagcataaatactgataggagatttcccaggccaaggcaaacacacttcctcctcatctccttgtgctagtgggcagaatatttgattgatgcctttttcactgagagtataagcttccatgtgtcccacctttatggcaggggtggaaggaggtacatttaattcccactgcctgcctttggcaagccctgggttctttgctccccatatagatgtctaagctaaaagccgtgggttaatgagactggcaaattgttccaggacagctacagcatcagctcacatattcacctctctggtttttcattcccctcatttttttctgagacagagtcttgctctgtcacccaggctggagtgcagtggcatgatctcagctcactgaaacctctgcctcctgggttcaagcaattctcctgcctcagcctcctgagtagctgggactacaggcgtgtgccaacacgcccggctaattttttgtatttttattagagacggagtttcaccgtgttagccaggatggtctcgatcgcttgacctcgtgatccaccctcctcggcctcccaaagtgctgggattacaggtgtgagccaccgcgcccggcctcattcccctcatttttgaccgtaaggatttcccctttcttgtaagttctgctatgtatttaaaagaatgttttctacattttatccagcatttctctgtgttctgttggaagggaagggcttaggtatctagtttgatacataggtagaagtggaacatttctctgtcccccagctgtcatcatataagataaacatcagataaaaagccacctgaaagtaaaactactgactcgtgtattagtgagtataatctcttctccatccttaggaaaatgttcatcccagctgcggagattaacaaatgggtgattgagctttctcctcgtatttggaccttgaaggttatataaatttttttcttatgaagagttggcatttctttttattgccaatggcaggcactcattcatatttgatctcctcaccttcccctcccctaaaaccaatctccagaactttttggactataaatttcttggtttgacttctggagaactgttcagaatattactttgcatttcaaattacaaacttaccttggtgtatctttttcttacaagctgcctaaatgaatatttggtatatattggtagttttattactatagtaaatcaaggaaatgcagtaaacttaaaatgtctttaagaaagccctgaaatcttcatgggtgaaattagaaattatcaactagataatagtatagataaatgaatttgtagctaattcttgctagttgttgcatccagagagctttgaataacatcattaatctactctttagccttgcatggtatgctatgaggctcctgttctgttcaagtattctaatcaatggctttgaaaagtttatcaaatttacatacagatcacaagcctaggagaaataactaattcacagatgacagaattaagattataaaagattttttttttgtaattttagtagagacagggttgccattgtattccagccttggcgacagagcaagactctgcctcaaaaaaaaaaaaaaaaaggttttggcaagctggaactctttctgcaaatgactaagatagaaaactgccaaggacaaatgaggagtagttagattttgaaaatattaatcatagaatagttgttgtatgctaagtcactgacccatattatgtacagcatttctgatctttactttgcaagattagtgatactatcccaatacactgctggagaaatcagaatttggagaaataagttgtccaaggcaagaagatagtaaattataagtacaagtgtaatatggacagtatctaacttgaaaagatttcaggcgaaaagaatctggggtttgccagtcagttgctcaaaaggtcaatgaaaaccaaatagtgaagctatcagagaagctaataaattatagactgcttgaacagttgtgtccagattaagggagataatagctttcccaccctactttgtgcaggtcatacctccccaaagtgtttacctaatcagtaggttcacaaactcttggtcattatagtatatgcctaaaatgtatgcacttaggaatgctaaaaatttaaatatggtctaaagcaaataaaagcaaagaggaaaaactttggacatcgtaaagactagaatagtcttttaaaaagaaagccagtatattggtttgaaatatagagatgtgtcccaatttcaagtattttaattgcaccttaatgaaattatctattttctatagattttagtactattgaatgtattactttactgttacctgaatttattataaagtgtttttgaataaataattctaaaagcatatactaagactcattcactttattcaaatatttgtgtgttctgtgtgccaggcatgggactcgttctaaggagaaagcagtgagcaaggcaggcatagtctgcctatataaagctcccaatctgaggaggataggcaactgaccacgcagtgtgaaccggggagcctattgcacaaccagtctgataatgctgcatctcagtctaaatatcctagtagtgtttcttagtcgcctcctgacaaaaaggcaaatatgaatgttctttctttgggcctagaaagtgatctagttgacatttctagcctaaaagatctgtactagaatatgacaagtgcaaagatcctggtatcctaaatgcaaagttttttacctgtttatcatatttttaaaataaattcagtcctctggagttttagtctcttttgcctagattttaacaaaatgcattttgcataaatatagtggagtcaaagtttccacaaagattataatgactcagaatttggtaagtaaggagatctcataatagacattatcctctgaaaaatccctttgccattaaaagtacagcatacacagttttatgtacaacagtatgtagaaatatatactttcattgtgtatgatccaaaagcagtggttcttaaccaggggtgattttgctgcctcacttgatattttcaaaataaagttattgttattttgatgggaacaaaatggtatcatgtctcattttaatttgtacctcactaattactagggagattaaatgttttagtatacacttgttagtcagtatgattttctctgatgaactgcctgtacgtattctttgctgatatttctactgatcctttgttggttatgtaacatcttagctaacatcttttccaattctgtagcttgtctcttcattctcttaatggagtttttttggttgacagacatttttattagtgttttcattaaggttaaatctttcaggtagggattttcccttgttcctaatgtcactcagttaagttttagttttccttgcagagatcttgtatagttttactatgtttattcctaagcactttgtttttttaaatgttcttataaaggacatttttttcataagtttttcctaattattactgttagaattaaaattagtttttacatattgatttttctatccagtaaccacagtaagctcttttaattctttctagaaatatatctggattcttttggattttctatatatatagtcatatcatctatgagtaatgtttggattttctatgtatataatcatatcatctatgaataatgtcagaaatggaattgttagatcatattccaatctatactgtttgctttttttttttccttgcctcattttactggctaggacctctctttagcacaatcatcagtagaatattgggacattctagtcctgtgcctcatctcaaagataaaagtgtaagtgtttacctttaaatttactgtttgctgcagggttttgttttttttttttttaatgtgtgtatttcccttatcagattaaagaagttcctttctgtccctaggctgctgtgaggttttattacagatggtgaattttagcagtttatctgcatttattgatgatgattattttccttgaatctgttaatgtagtgaactacactgtttgattttctaaggttaaatcatcttatactcctagtataacctcaactgatccattttatctattgctttattttgcttgcaaacgttttggttagtgtttccaagtgggatttcctttccagcatttcttgagaaactttttgttttcccaaattttgaatcccaagaaaaatcagtaataaaatcaggaaaataggaaagatattataattctccggtgagaattaaagcttagcaatcaacatagacacattgctgatttgaaggaatccagcaacacaaacagcactgaacactgagacatagtattaaaggttaaggtcagtattcccatactgggacagaaacataggagagaagtggtcatgatcttgcttattagttcttgccatgatataagtgtgtgttcatagctggtatactactaatggtgagtcacttaaaaacacccacacacacacaacaaaatttaccatctcgtttttaagtatacggttcagtagcgataaaatacatttccagtggtgtgcaaccaacctccagcacttctttaaccttacaaaactaaaattctatacccattaaacaactccccactcctctattcaaccagcccctgagaactactgttctaccttttgtctctctgcatttgacattcaaggtactgtaccttttataagtagaatcatgcaatatttgtctctttgtgactagcttatttcacttagcataatgtcctcaaggttcgtctatgttgtaatatattgcagaatttccttcctttttaaggctgaataatattccattgtgtatgtgtatatactgtatatattttatttatccattcatccatcagtggatactagagttgtctctaccctttgactattgtgaatattgtcactatttacatgggtatacaaatatgtcttcagaactcttttttctttatacccagaaacggaattgttggatcatatagtcattctatttttaactttttaaggagccaccatactgtttttccacagtggccgaaccattttacaactccaccatcagtgcacaagggttgcaatttctcaacatccttatcaacacttattttctgtttttatgttttgagtagcagacataatgggtgtgggtgactcttacaagtagaagcattgtatattttacacaaatcctataaatggtattctaagttttagaaacaaaaaatgtccttcaattgacggtttcaaaacctgattctgtgtattgttgttaaccttgttaggagatcgtaacgttaggttacttgaaaactacccaaaatgttccctactgtagtgtttgaatatttaatataaacttataactctttgtaacactaaattttattcattcattcattcattcattcattcattcattctgagatggagtcccgctctgtcgcccaggctggagtgcagcagcacgatctcggctcactgcaacctctgcctcccaggttcaagcgattcccctgcctcagcctcccaagtagctgggactacaggtgcccaccaccatgtccagctaatttttgtatttttcatagagacagggtttcaccatgttggccaggctggtctcaaactcctgacctcagtgatatgcccgcctcagcaccccaaagtgctgggattacaggcgtgagccactgtgcctggccaataattcttatttcttaaacagtgtttttagatttccatgattatgagagttgcaaaggttttaagacagaaaaaggaaattagctgtttgccagatttattttaaatcattgcagtgtaaagcatcatggacaagtggacttcacaggcatttcaaagatgaaaaggacaaaaacacagaaaataattgtggtaagtcagtgccatctatgaaatgataccaattctacaaaaactcttcataatattagaataacccattttatgaagccagcatactcaaaaccagacagagaattacaagaaagatgccgggcacacatctgtaatcccagcactttgggaggccaaggtggcaaatcacttttaagtcaggattttgagaccctggccaatatggtgaaaccccatctctaccaaagatttaaaaaaaaaaattagctgggtgtagtggcacatgcttgtaatcccagctactcaggtggctgaggcacaagaatcacttgaacccaagaggcagaggttgcagtgggctgagacgtgccactgcactccagcctcggtgacagagtgagactgtctcataaaaaaaaaaaattaaaagaaagaaaactaaagaccaatatcctccatgaacattgatgtaaaaatcctcacaaaatattagcaaatcaattctatcaatataagaaagaggtaaatcatgaccaaatggcattattccagattgactcaatcaatgtaactaaataaaccatatgatcatgccaatagtgcagaaaaagcttgtgagaaaattcagtactcattcatgataaaactcatcaaactaggaataaaagacatctgacaaaggacatctgtgaaaaacttacagctcacgtcatatttaacgatgaaaaccttggttatctccaaagatcaggaacaaggcaaggatgccactcttaccacttctatcccacattgcactggagttcctagccatgcagtaatgtaaatagaaagcaataaaagacataccgttttataaaggaagaagtgggaggagccaagatggccaaataggaacagctccggtctacagctcccagtgtgagcgacgcagaagacgggtgatttctgcatttccatctgagataccgggttcatctcactagggagtgccagacagtaggtgcaggacagtgggtgcagcgcaccgtgcgccagccgaagcagggcgtggcatcgcatcacacgggaagcgcaaggggtccgggagttccctttcctggtcaaggaaaggggtgacagatggcacctggaaaatcgggccactcccacccgaatactgcgcttttccgacgggcttaggaaacggtgcaccaggaaattatatcccgcacctggctcggagggtcctacgcccacggagtcttgctgattgctagcacagcagtctgagatcaaactgcaaggctgcagcgaggctggcggaggggcacccgccattgcccaggctcgcttaggtaaacaaagcagccgggaagctccaactgggtggagcccaccacagctcaaggaggcctgcctgcctctgtaggctcagaaacctctgcagacttaaatgtccctgtctgacagctttgaggagagcagtggttctcccagcacgcagtttgagatctgagaatgggcagactgcctcctcaagtaggtccctgacccctgagcagcctaaccgggaggcaccccccagtggggcagactgatacctcacatggccaggtactcctctgagacaaaacttccagaggaacgatcagacagcagcattcgcggttcatgaaaatccgtggttctgcagacaccgctgctgatacccaggcaaacggtctggagtggacctctagcaaactccaacagacctgcagctgagggtcctgtctgttagaaggaaaactaacaacagaaaggatatccacaccaaaaacccatctgtacatcaccatcatcaaagaccaaaagtagataaaaccacaaagatggggaaaaaacagagcagaaaaactggaaactctaaaaaggagagcgcctctcctcctccaaaggaacgcagttccttaccagcaatggaacaaagctggatggagaatgactttgacgagttgagagaagaaggcttcagatgatcaaactactccgagctacaggaggaaattcaaaccaaaggcaaagaagttgaaaactttgaaaaaaatttagacaaatgtataactagaataaccaatacagagaagtgcttaaaggagctgatggagctgaaagccaaggctcgaaaactacgtgaagaatgcagaagcctcaggagctgatgcgatcaactggaagaaagggtatcagcaatggaaaatgaaatgaataaaatgaagcgagaagggaagtttagagaaaaaagaataaaaagaaacgaacaaagcctccaagaaatatgggactatgtgaaaagaccaaatctacatctgattggtgtacctgaaagtgatggggagaatggaaccaagatggaaaacactctgcaggatattatccaggagaacttccccaatctagcaaggcaggccaacgttcaggttcaggaaatacagagaacgccacaaagatactcctcgagaagagcaactccaagacacataattgtcagattcaccaaagttgaaatgaaggaaaaaatgttaagggcagccagagagaaaggtcgggttaccctcaaagggaagcccatcagactaacagcggatcttggcagaaaccctacaagccagaagagagtgggggccaatattcaacattcttaaagaaaagaattttcaacccagaatttcatatccagccaaactaagcttcatcagtgaaggagaaataaaatactttacagacaagcaaatgctgagagattttgtcaccaccaggcctgccctaaaagagctcctgaaggaagcactaaacatggaaaggaacaaccggtaccagccactgcaaaatcatgccaaaatgtaaagaccatcaagactaggaagaaactgcatcaactaacgaacaaaataaccagctaacatcataatgacaggatcaaattcacacataacaatattaactttaaatgtatatggactaaatgctccaattaaaagacacagactggcaaattggataaagagtcaagacccgtcagtgtgctgtattcaggaaacccatctcacgtgcagagacacacataggctcaaaataaaaggatggaggaagatctaccaagcaaatggaaaacaaaaaaaggcaggggttgcaatactagtctctgataaaacagactttaaaccaacaaagatcaaaagaaacaaagaaggccattacataatggtaaagggatcaattcaacaagaagagctaactatcctacatatatatgcaaccaatacaggagcacccagattcataaagcaagtcctgagtgacctacaaagagacttagactcccacacaataataatgggagactttaacaccccactgtcaacattacacagatcaacgagacaaaaagtcaacaaggatacccaggaattgaactcagctctgcaccaagtggacctaatagacatctacagaactctccaccccaaatcaacagaatatacattcttttcagcaccacacctattccaaaattgaccacatagttggaagtaaagctctcctcagcaaatgtaaaagaacagaaattataacaaactgtctctcagaccacagtgcaatcaaactagaactcaggattaagaatctcactcaaaaccgctcaactacatggaaactgaacaacctgctcctgaatgggtacagtacataacgaaatgaaggcagaaacaaagatgttctttgaaaccaacaagaacaaagacacaacataccagaatctctgggacacattcaaagcagtgtgtagagggaaatttatagcactaaatgcccacaagataaagcaggaaagatccaaaattgacaccctaacatcacaattaaaagaactagaaaagcaagagcaaacacattcaaaagctagcagaaggcaagaaataactaaaatcagagcagaactgaaggaaatagagacacaaaaaaccgttcaaaaaattaatgaatccaggagctggttttttgaaaggatcaacaaaattaatagaccgctagcaagactaataaagaaaaaaggagagaagaatcaaatagacacaataaaaaatgataaaggggatatcaccaccgatcccacagaaatacaaactaccatcagagaatactacaaacacctctatgcaaataaactagaaaatctagaagaaatggataaattcctcgacacatacactctcccgagactaaaccaggaagaagttgaatctctgaatagacgaataacaggatctgaaattgtggcaataatcaatagcttaccaacaaaaaagagtccaggaccagatggattcacagccgaattctaccagaggtacaaggaggaactggtaccattccttctgaaactattccaatcaatagaaaaagagggaatcctccctaactcattttatgaggccagcatcatcctgataccaaagccgggcagagacacaaccaaaaaagagaatgttagaccaatatccttgatgaacattgatgcaaaaatcctcaataaaatactggcaaactgaatccagcagcacatcaaaaagcctatccaccatgatcaagtgggcttcatccctgggatgccaggctggttcaatgtacgcaaatcaataaatgtaatccagcatataaacagaaccaaagacaaaaaacacatgattatctcaatagatgcagaaaaggccttggacaaaattcaacaacccttcatgctaaaaactctcaataaattaggtattgatgggacgtatctcaaaataataagagctatctatgacagtcccacagccaatatcatactgaatgggcaaaaactggaagcattccctttgaaaactggcacaagacagggatgccctctctcaccactcctattcaacatagtgttggaagttctggccagggcaatcaggcaggagaaggaaataaagggtattcaattaggaaaagaggaagtcaaattgtccctgtttgcagatgacatgattgtatatctagaaaaccccactgtctcagcccaaaatctccttaagctgataagcaactttagcaaagtctcaggatacaaaatcaatgtacaaaaatcagaagcattcttatacaccaataacagacaaacagagagccaaatcatgagtgaactcccattcacaattgcttcaaagagaataaaatacctgggaatccaacttacaagggatgtgaaggacctcttcaaggagaactacaaaacactgctcaacgaaataaaagaggatacaaacaaatggaagaacattccatgctcatgggtaggaagaatcaatatcgtgaaaatgggcatactgcccaaggtaatttatagattcaatgccatcctcatcaagctaccaatgactttcttcacagaattggaaaaaactactttaaagttcatatggaaccaaaaagggcccgcatcggcaagtcaatcctaagccaaaagaacaaagctggaggcatcacgctacctgacttcaaactatactacaaggctacagtaaccaaaacagcatggtactggtaccaaaacagagatatagatcaatggaacagaacagagccctcagaaataatgctgcatatctacaactatctgatctttgacaaacctgagaaaaacaagcaatggggaaaggattccctatttaataaatggtgctgggaaaactggctagccatatggagaaagctgaaactggatcccttccttacaccttatacaaaaattaactcaagatggattaaagacttaaacgttagacctaaaaccataaaaaccctagaagaaaacctaggcattaccattcaggacataggcatgggcaaggacttcatgtccaaaacaccaaaagcaatggcaacaaaagccaaaattgacaaatgggatctaattaaactaaagagcttctgcacagcaaaagaaactaccatcagagtgaacaggcaacctacaaaatgggagaaaattttcgcaacctactcatctgacaaagggctaatatccagaatctacaatgaactcaaacaaatttacaagaaaaaaacaaccccatcaaaaagtgggtgaaggacatgaacagacacttctcaaaagaagacatttatgcagccaaaaaacacatgaaaaaatgctcatcatcactggccatcagagaaatgcaaatcaaaaccactatgagatacatctcacaccagttagagtggcgatcattaaaaagtcaggaaacaacaggtgctggagaggatgtggagaaataggaacccttttacactgttggtgggactgtaaactagttcaaccattgtggaagtcagtgtggcgattcctcggggatctagaactagaaataccatttgacccagccatcccattactgggtatatacccaaaggactataaatcatgctgctataaagacacatgcacacgtatgtttattgccgcactattcacaatagcaaagacttggaaccaacccaaatgtccaaaaatgatagactggattaagaaaatgtggcacatatataccatggaatactatgcagccataaaaaatgatgggttcatgtcctttgtagggacatggatgaaattggaaatcatcattctcagtaaactatcgcaggacaaaaaaccaaacaccgcatattctcactcacaggtgggaattgaacaatgagaacacatggacacaggaaggggaacatcacactctggggactgttgtggggtggggggaggggctagggatagcattaggagatatacctaatgctaaatgacgagttaatgggtgcagcacaccagcatggcacatgtatacatatgtaactaattcgcacattgtgcacatgtaccctaaaacttaaagtataataataataaaataaaattaaaaaaaaaaagaaaatccatagctcctgggtttatttaagtaacccttactcagggttagcctgctaagggacttctacacaaggacaaataacattagactgtacctagaagttcccttgacaaggtgaagggagcacaggccagctgctttactttcttactcctcaagcaggacttggtgataaatgttatatggaatgtcttggagagtaaatagtcatggatataatttctcaaaaaggggtaatatttgacagatttcatgggggaagtttatttgctgtgaattgtcagatctagcaggcacagtagatacccattacatgagacatttgggaattatctccagcagatttgaaaagcacaagtaagttacacagcaagagccctcatctccacgtcacctaattcagttgcccaaatgcttctctctcaggccacactgatgatactgactatggtatacctatggtacatcactcaaggtagagacgttccctacgaacttgggccttgctcatgaatgagttggctcaagctaaaactgcattgatgccttactacagctccacttaggtatagccctaaagaacagtgctaagggaaaatcctagtgggcaaagctttgagcactatacttggtcattcacttcttattgagagagaagtagccttaagtagagatacacatggattcttgggcagtggcaaattgactcattggtcaggtacttaacttggaaagggcaaaattagatcagagacaaggaaatctgggaaatgtcataacaattgacttataaggtgtggatcttcacatatcacttttatgcttacaagagagcatccactacagaagagacattaaacaaccagatgtataaggtgactttggcactgagggccagccaacatgctcttggccaccctagtgcttgtgcaattagctcatctacagaagagtcatgatggcatggatggaagccaagggcccaaaatcatgggccttttctcagaaaaactaatctagctgcttccactgctgaatgacacttggccttgatatgacaccatcatttgaaaagaccaatcagttctttggtggcaacatgattatatcagacccattcttgtttggacattgcagcaattcattcttaacagggattactacttggtccaggtatggatttgcctttcttgactatggtgactcttatcagaaccactatctaaggacctataaaatgcatgatttactattatgggctttctgaccaagggaccaattttacagtaaaggaatttaaaaaatgagtagagtatatgacaatggaaaacactagtcctatcatatgccacacaatccagaaactattagaatgttaaattggcctgttaaggagtaacctaaggttctagcttaagtatgacatgcagctaggttggagcattttcctccaggatgtgatatatacattgaaccaagggccattatatggtgctctgtctaaataacttaaatagtgttatgacatatgggtccaagaaccaagggatggaaattaggttggcccctctcaccactactctcagtgatcccttgggaatttgtgcttcttgttcctacaagttgagactcagcagaactgagtccatgtagccactggatgcatgtatcctccctgtatccagtgagggaatggttcccctggaggtcacaataaggattccactgaacctagaactatgattgctacctggtcatgtttggctcctcatgctggtagataaatatctggtttctctgtccactagtaggaaaattctgaagtacattctgtatggttcctcagagcattcctagcaaactgaggcctggatacccacagtaataacccattcttaacacaaaagttttttggcttttctcccttccctgtgtcactttctctaatttctaatttctctaatttctaattctctaatttctaattctctaatttctaatttgtgctttctgggatcatctccgaaataaactatctgtaccaatgtcttatggtttcctttgaaaggaatcactaagattgttccttttctctttgtgttgattttaaatgtattcacaaattctttgacaatcttccttttaagagatagagcttaattcccctctccataagtataggctggacttgatgcatttctaattaatagaatagggcagaagtgatggtgtgtggcctctcagactagttcttaaaaggcattgcggcttcctccttgctctctctctctctctcaggttgcttgctcagccatgttatgaggccactcaagctatcctatggggaggtctaagtatcaaggaattgaggcctcctgccaacaactgttcaagtgtaccatcttggaggcagattctccaacccagtcaagctttcagatgactgcagccctggccaaaatctttactgcaacctcctgcgagacttcaagccagagccacccaactaaaccactcccagtttcctaaccctcagaaactgaatgagataataactgttgctttaagctgctatgtcttggggtaatttattatgcagtgatagaaaactaattcactgctctaacctggaagaaagggaatgggaatccaaagagttgtattgcatgcagagtagtgaaggcaaatcgtaggccccaaaaaaactgagattaggggaatgatctaggaaggaaaatgaaaaaaggaaagggcaacattgatgaaagcaagtaaagagaaaaatgtaaacaaggaaagataacattataaaagaaagaaataactatgacataaaataggcagtaactaagtgtgagagaaactgagaattgcaaagacaaactagaatgagtaagcagacagagaatcaagaggaagaaagaaaaaaggttcagtgaagaaaaaaatggagtaatgagaggataaacgtgggagaggggatttaaagaagcaaggcacactaggatatgggataaagggaccgagagctctgccttccatgaatgcactaaatgcctcaagtaaacatgcaaaataatcagtctgaagcttcttgcacctaaatgtagtctctttacttaagtgtgactgttagaatactacagtttctcagaatactaggaataatttctatatttgccatgatcattgtattcagtccagtgttctatttctgctcaatcttcccttacttaactgagctagattctgtgcccagaatatatacacaagttattccagtcagaatacactatctcttggctataactgatggatggaaggctcaaagggctataactcagaatagaaataaagtactttatagtccataagtagaatcaggcgttaatctagttacatttggttcttgataaacattttcatagtaagtatcatctggtattcccatttgcatctttgatatgtctcctccatagttatatatgtttttctgtgcttgattaaacctgaatcctaaagagaagtgacaaatgattagaaagataccagatataataagatgctcactcaaaatgctactgtgttgtggtctgttccacattccttttcaccattcttaaagcaaatatcttcacctgaaaccagaaacaccccaaatttctgagttcatcccactttcactcccacatatcactgtccatccctacaaaaggctctgcaggacctgggttttaggtctgatctactaataactagctgtgtaatttgggacaaattatttaacctaagtcttagtgctctcatctgtaaaatggggataataaccgcacctacctcatcatattcctgcaagagttaaatgtgacagtgcatgtaaagaacttagagcatctggtatttagttggtgctctgtaactattagctaacttcttcattcacaaagggagaaatgcccttttcctctcaagagctcatgtttctcaatctgctctggatttaccttctcttgcttcttgaagaagtgacacacattatcctcttctccaatgccaacatcttcaatgtatcaccttcactggcttcagttatgcaaatctccactacttaaaataattttcacttgcttttatgctccttccaactaccatcctatatctttcttcttttcacagtaatctcttttaactcagtaacttatattgtttccttttttttttttttttgagacagggtcttactctgttgcccaggctagagtgcagtggcgcaatcgcacagcctccacctcctgggctcaaacaactctcccgcctcagcttcccaagtagcaaggactacaggtgtatgccaccatgccctgctgacattttattttttgtagagtgagagtctctttatgttgcccaggatagtcttgaactctttgcctcaagtgatcctccaaacttagcctcccaaagtgctgggattacaggcatgagccattgtgctgggtctctgtgctgatttaaatttgtaaaagatgactatctattgagcagagaagggaatggagaagcattggtttggaggctattgcagaagcctgtagaggggtgaaggcaacctgggctgagtgggtggcagtgagctggaaataggtggattggttaatgctaaggatggctcatattaatggagtatgcattatgagataggcactattctaagctctgtgcatgattatctcattatctcacaacctatgtgctaggtactaccgttattcttcttttactagtgaagaaaccgagctagtaacttgcccaagatcatatagccagtaaagagtggagccaaaaatcaaacccaggcactctgaatcaagagtccacaatcctttgggaagccaagatgggcagatcacgagtccagcctgggcaacatggcgaaatcccatcttgacaaaaatacaaaaattagctgggcatggtggtgtgtgcctatggtcccagctacccaggaggctgaagtgggagaattgcttgagcctgggaggcagaggctgcagggaactgaggtccaggccactgcactccagcctgggcgacagagcaagactccgtctcaaaaaaaaaaaagattcatatttttaaaatcactttattcaaacttaaataatataggacatttccttctattcccaaataacaatcttacatacaaaggtaaaaatgacttgacaaatgcatctaaatttatatactatgcagattactgaaatgttaaatgcctagaaatacgtgtgtggaatgtattttttgttcatgagaatttcctataaagtactgctaaaaatcacctacctttgaagttagccgaagagttgcttgtagcaatttccttccagctggcaatgtacctaagcacattatatgaggattcattaaatttaatcgattcattagtacatacttagactacttctaaaattccacttttcagaaatcttagattaatgatggcatgttcactagcctccatgtgtaactctcatgactttctcaccttctagtagttcacatccagctaagaaccttcaggacaaggagttgaaggaggtataaaaatggtgcccaccatctgccatacttagtgtcctttcacctccctctagcatgccccctcattttatcctgttaattccagaaagatcatgtcctcagctgagtgtttactaagaagttagttaataacatccaaatttaaagcatgggcagaaaactctcctggagacaacaacaaaaactttctcctttgttctggattaccagattcactgtctctgatacgtgaagggaaatttaaagcatctagtttctgagctcattagagcagcagcgctgtctttgcagtgtccagaacacgttaagagatacatttaggtatggcaaatgcagctgtcacctcagctcctgaacagagactgaaatagagagacgagggttgcctgagaagaggtagaatagggaaggacaaggtacaaccttctgtgaggatgatggaaaagcaccaagaggcaggtttcctaagatttatttcaccttaggctccatatcccactttcctaaggtgcctttacaactgcacccactttaatcaaaaaatcaggtcaggatttggttacagtaggtgctaaaagggagctagcacagagaggtggagaattagaactgtcacgtaattggctgggcgcagtggctcacacctgtaataccagcactctggaaggccgaggtgggcggatcacaaggtcaggagatcgagacgaccctggctaacacggtgaaaccccatctctactaaaaatacaaaaaattagccaggtgtggtgatgcatgcctgtagtttcagctactcgggaggctgaggcaggagaacggcctaaaacctgggaggtggagcttgcagtgaactgagatggtgccactgaactccagcttgggcgacagagcgagatctcaaaaaagaaaaaaaaaaagaattatcatgtaattcagaaaacactgtgattttcttttcttttctttctttctttttttttttttttttttttttttgagacaaaatctcgctcttgtgccctaggctggagtgtgatggcgcgatctcggctcactgcaaccttggcctcctgggttcaagagattctcctgcctcagcctcccaagtagctgggattacaggtgcctgccaccacgcccggctaatttttgtacttttagtacagacagggtttcaccatgttggccaggctggtctcgaactcctgacctcaggtgatccacccacctcggcctcccaaagtgacactgtgattttctaattatttgttccatttgaattatttttacttctgtcaaccctgtgctcctgaagttttttgcagtaggagggtatatacttccaacagtatttaatacttatttttatggagacaaggtctcgctctgtctcccaggctgcagtgcactggtgccatcatgggtcactgcagcctcaaactaatgggctcaagtgatcctcctgcctcagcctcctgaatagatgggaccacagatgcatgccaccacacctggctaactttttaattttttgtagagatggggtctcggtattttgcccaggctggtcttgaactcttgggctcaagtgatccacctaccttggcctcccaaagtgctgggattataggcgtgagccactgcacttggcctatccaacagtatttaattacaatcagacgttgtgtctgaatttggctccttctcactactgctaccccttggtgctctgcgaactttcttcaatggccttcaataggatactgctgggtgacttaaatgaaaggatgcaggacaagagcaggtggtgtaactccttccacaatctctcagtaggcaattcagtttggtttgaccttaaattttagcagactttgtgctttcagtggttgctcaggagcactataaagagtcatcctgcttgcttggatttatacacagaaaagactttcattccaccttcaagaaaccaagataaaagaccttgatcgatagtgtgctgagccctgacaatctggggcacaaacacttaccatagctaggccccatcactgtccctgctttatccaagattagcacatgacttttattccattattttaaaaagaacttctcataaagaacataccagcagtaattgataagaaatctaagttttacagacatagaagcaagtctgatgaaagcactaccatgctgtttatatcacagagctcatctttctcacgaagaaatttgtagaaatttttagataatagttatcaagtgtgtgtgcagtctacaatgaatccatttgttaaattacaaatttaacactttaagagctcagaaaaagtccctagccagagaggtcacaaaactacatatcttagaaatcaaaggagcagcttcagatatagaaactatccataacagacataggcacagagctctccccaacagagtatcaggaaattatttaatattttctagctggtgattgcttaataggtatgtcaaaattcacttgctgtttgaaaaacgtgatgatcctggaagaggaacatctgaatatccattaggatgaatgccagcaaaagccacggtagctgtcctgtggcattgtgcataactccgtgatggtgatgtggggattgttctgggttctaaacagctgcagcaacatagctctggatacaggaatttgcaacagtactcattagtgtgtttgagtccactagtgaaactggctctatccattcttccaaatgataataacaatgttcggttaatagttgcagtacgcatctgaagatggacatggtttcatctcaggagagcatcggtctgtcataacggactagaacaaaagcctttggggagaaactggttgttatcactaaatatcagtgttcaaggcatttatgccattctaactgtccaactgtagaaaaatgtccatagacgttgaaggatactttccaaggaattaggggtgaccaattctctagaggggacaaatgtcagacttttaaattttcatcaaacaaggtgtcaccaagccagttacaaatatctagaggtctacaaaggtcaaacggggaagtagactgtggagaccataaatgtgctggaaagaaggggcttatgcctaatgtctgcagttagctaggggaaggcctttgcaaagtttggtcttactgagataatcagtgcttgtggccaagtagtgctactgaaatatacccagataatcacacttgaaatttcatctgaaatttttgttgttcaaggctcaatgtaaaaccttgctaagagtccatgttggtacaaaattatgagtatcctcaactcagaagataaactgatagaaattatacataacttggaagcaaggtatttgcatttttttaatggaaattttcagttgctcttatcatctgaaagctaggtatatccatcccactcctatatgctatgaagaaattgcttcaagtcttactggtttatcctgggtttttttgttttgctctgttttgttttgagacagagtctcgctctgtcacccaggcttgagtgcagtggcgcgatctcagctcactgcaagctctgcctcccaatggcatgaatcgtgggttcatgccattctcctgcctcggcctcccaagtagctaggactacaggcacccaccaccacgcccggctaattttttatatttttagtagagacggggtttcactgtgttaagcaagatggtctcgatctcctgacctcaagatccgccctcctcggcctcccaaagcgctgggattacaggcatgagccacctcgcctggctgttttttttttatttattttattttttatttatttatatttatttttgagacggagtctcgctctgttgcccaggctggagtgcagtggcgcgatgtcagctcacagcaacctccacctcctgggttcacgccattctcctgtctcagcctccctagtagctgggactacaggtgcctgccaatttttggtgggttaatttttgtatttttagtggagacggggtttcaccgtgttagccaggatagtctcgatctcccgacctcatgatccacctgcctcagcctcccaaagtgctgggattacaggcgtaagccaccacacccagcctgttttttgttttttaaagggaagccattaagacttcacctactatcacttagcggatgatggcggggaaagtcttatgtggaccgagatgcctattttttcttccctttgaactcaatggttttattctttttatattccagtaatgacagaatatagaatatctggtatcaattttttgtacttgtttgccggcccttagcttgaatcagccaatggtacaagggaaaggcagagcaggatttcaaaagctcacctgagaaaattctctatccagtcctgggaaactcattcaaaatggacctctcctacctctctttccctttcttccctctcttttccactcagcaatttttactcttaggaagaaaagtaaaagcaaggcattgcagctcctttgtttggctgtcatttcttgcatcattattaccatctgcatttgttcagtgtcccaggaactacagacatgctgtctatagggaatctcaagactgaggtctgcacaaaatattggggttattgaatcatagcaatttcttcttatttaaaaatattttaaagcatctactatggacacttagtcctttattttttatcttttccttattattttctgatctatccttctcatcagtatcttcttttttcttttattcttgttttgattttcctttgtcttgatcattcttccccctttttcttcatttatctttccttgcatcattattctctcccctgcttcctctggcttctttttttcatgttctattgttcaatgaccattaacttgatttttcctaccccattttcttatctcacttttactgatttcttctgttttcttacatttctttacttacactatcttcatttaaatttttctgcctcttcatgcagtatccacattctttattgtagttgagtaaatattgaacattttaagcagctttattgaggtatataattcatatgccatacaattcccccatttaaagtatagtatccagtggcttttagtataatattagcagagttgtggatccaccaccataatgaattttcttttcttttttttgagacggagtttcactcgttgcccaggctggagtgcaatggcacgatctcagctcactgcaacctccacttcccagattcaagtgattctcctgcctcagcctcctgatagctgggattacaggtgcccgccaccaggcctgactaatttttgtatttttagtagagacagggtttcaccatgttgatcaggctggtcttgaactcgggacctcaaacagtccacccgccttgacctcccaaagagctgggattacaggcgtgagccaccatgcctggcccacaatgaattttcaattattttcattgcctcaaaaagagaccctgcaccccatagccaccaccaccccctccccccagttaattctccacccccaggaaaccactaatctattttctgtctctataggtttgcctattctgggtatttcctataaataaaataacacatgatcctttgtgattggcttctttcacttagcagattcatcaatgttatggcatagatcagaacttaatttctttctttttttttaaatagaggcgctgtctcactatgtttcccaggctggtctcaaattcctaggctcaagcaatcctcccatctctgcctccaaaaatgctgggattacaggcgtgagccactacacttggctttttgtgtgtgtgtgtgtgtgtctcgctctgtcacccagactggagtacagtggtgtgatcatggctcactacagcatctacgtcctggctcaagagaacctcttacctcagcctcctgagtagctgggactacagttatgcaccagcaggcctgggataattattgattttttgtagagatggggtctcgctatgttgcccagactagtctcaaaatcctgggctcaagtaatctgcttggtctcccaaagtgctgggattacaggcatgagccaccatgcccagcccactaatttttattgtggaataatattctattggatagatctatcatatttcatttagccattcgtcagctcatggacatttggggtgtttctgcttttttgctattatgataatgctgctatgaacatttatgcacaggtttttgtgtagacatgtatttccccttctcttgggtatatatctaggagtggagctgctggatcacatgtcagctctatgtttaaccacttgaggaactgccagattgttttccaaagtggctgcaccattgcacattcccactagcagtgtatgagttccaatttctccacattcttgcaaacacttgttattatctgtctttttaattatagctatcctagtaggtgtgaagtggtatctcattatggttttgattgcatttccttaatggggctacattaaatattctaaaatttcccccacacaagaaatcttaaaaatgttttctaagggccatagtacatcactgaaaacttataacattttagtgtctcatacagaaaggttagggaatatagatgaaagaaaacctttgtattattaatttcatgctcttagccttttttctaaatcccaaagtaagaagcaaagcagactaaagcataagaataaagtctaagaataaagagtcctaagtctaattttctgtttactatttttggatcattcattttcttacccctcatgtcttcttctgttctttctagacaaataatagatactcgggttttttttttctttgaagattgtttgtggccccaagattcaacaaggaaataggaaatgttagaaaaaaactatgatgactgcccttgttccccaagaatagcaacatgtacttactcatcaaagttcagtgtatttgtccagttcagcacttcatccacttcccattccatcacagaatctatccccccatcttcaaaagctctaatcagcccctttgttgcagtgtgaattagtcctagagtttcatgatgtgttgacttagcctccagacttcctgagtagtacctaaataggcaaaagggaaagagaagtaaatcttttgaaataggagattacaagtagatacaggcaatatatattgttgctatttacatattaaaactatttgcatattgaataaagttttcattcctatataactcagatgcatctaaaccaagatctatgtgatggaatcttctggggggaaaagcaacttaaccacactaacttaaaatcacccctcaataagttgcatttttatgatacgaagaaaaactaagttattaaattgttgaatcttagaattatagagtggaaagggtcttagaaaccaaataactaacctactcatttttataggtgaggaaataaatctttgaggagttaagtaaattttacaaaatcaagaggctaatagcagataaagagggaaggaaagtgaaaaaaggaaagagaggaagaggtaaagggaaaacagataccttttctttgtgccaggtacttttcatacagtcttatttaattctttttaaaaagacacagccaggcccagcgcggtggctcacgcctataatcacagaacttgggaggccaacatgggtggatcacgaagtcaggagttcgagaccagcctggccaacatggtgaaaccctgtctctactaaaaatacaaaaattagctgggcatggtggcgggcccctgtaatcccagctacttgggaagctgaggcaggagaatcgctagaacctgggaggtggaggttgcagcgagccgagatcatgaaactgcactccagcctgggcgacagagcaagactccatctcaaaaaaaaaaaaaaaaaaaaaagacacagccatttgtggcagctatttttattccccttttagagataaagaaactgagacctggagaagttaaaatatcattcaaagctgggcacagtggctcaagcctgtaatcccaacacttttggagactgagtcaggaagatcatttgaggccaggagtttgagaccagcctgggcaacagagagatcctcatctcaattaataattttaaaaatttttaaagaaattgttcaagatcatgtagcagtaaatacttatgagagccagtattcagacccttagtcttaaattcagcctccttctgcagcactgcctgtcttaatctgagcacataaaataatacattcactgataatgagctgagtaactagagagaagttagtagtccttaccaagatcatcaaaactttttttggtatttattttaagatctacattggtagccattttaaagggtcacctattatgaagttgtattcatttattaattcaacactcattgattaggaaaagcatagtggtgatatggagcaagactctggtatcgaattatctggatgtgaatcttggttctgtgttacataatctgctaaataacctagcctttctgggcctcactgacctcttccttaaaatggtaatcagggccaggtgtggtagctcatgcctataatcccagcactttgggagggtaaggcaggaggatcacttgaagccagaagtttaagaacatactggacaacacagtgagaccccatctctacaaacaataaaaaacatagccaagcacagtggcacacgcctgtagtcccagctactggggaggcggaggtgggagaattgtttgagcccagaagttcaaggctgcggtcagctatgatagcactactgcactccagcctgggtaacagagtgagaccttatctcttaaaaaaaaaaaaaaatgataacactacttcctcctagcattcttgagaggtttagaagcataaatccatgtgggatgggcatggatggtggctcatgcctgcaatcccagcactttgggagactgaggtgggagactcccttgaatccaggagttcaagaccagcctgggtaaaatagggacaacctgtctctacaatttttttttttttttgagatggagttgctctgtctcccaggctggagtgcagtgatgtgatctcggctcactgcaacctccacctcccgggttcaagcaattctcctgccccagcctcccaagtagctgggactacagcccaccacgcccagctaatttttgtatttttagtagagatgaggtttcaccatattggccaggctggtctcaaactcctgacctcgtgatctgcccgcctcagcctcccaaagtgttgtgattacaggcgtgagccactgcgcccagcccaaattttttttttttttttttgagatggaatctcactctattgcccaggctggagtgcagtggcgccatctcggctcactgcaagctccgcctcccgggttcacgccagtctcctgtctcagcctcccgagtagctgggactacaggcgcctgccaccacgcctggctaattttttgtattttttagtagagacgggatttcaccgtgtgagcccggatggtctcgatctcctgacctcgtgatctgcctgcctcggcctcacaaagtgctgggattacaggtgtgagccaccgcgcccagccaaaattttttaaaataataataataaaaaaagaagtgtaaatctatgtaaagcatttagaacaatgactggtacacagtaagcattcataggctgacactgttatcgggtggcagggctataacagtgagaagatacatccttgccctcatgaaattttgacttcatcagattttaaacggataatgatccatgagagcaaatgctccgttacccaggctggagtgcagtggcacgatcttggctcactgtaacctctgcctcctgggttcaagcagttctcctgcctcagcctttcaactagctgggatcacaggagcacaccaccaggcttagctaatttttgtatttttagtagagatggggtttcaccatgttggccaggctggtctcaaactcctgacctcaagtgatctgcccgcctccacctcccaaagtgctgggattacaggtatgagccagtgtgcctgacctcttatttttcttttttcaacagtgatatatgataattcagatatcttttttctcttattaaggaagtataaaatgcactttgttttcaagagagtcatagtaattgttcaaataatttaattctcaggttttgaactcttttaaaatgttactattggccggttgcggtggcttatgcctgtaatcccaacactttgggaggccgaggcgggcggatcacgaggtcaggagattgagaccatcctggctaacacagtgaaattctgtctctactaaaaatacaaaaaaaaaattagctgggcgtggtggcgggtgcttgtattcccagctactagggaggctgaggcgggacaatggcatgaacctgggaaacggagcttgcagtgagctgagatggcgccactgcactccagcctgggcaacagagcaagactccgtcttaaaataaataaataaataaataaataaataaataaataaataaataaaataaaatagttactattataattaaatggtataaatattgataaaataacaggtttgcaagtagaaagtgtttcaaatatagtgatcagaaataaaagatcactttataaacataatttgttttataaacaaactaatgattttttaaaaagacctaaaattggctagggtggtggctcacgcctgtaatcccagaactttgagaggcaaaggtgggcaggtcatgtgaggtcaggagtttgaggctggcctggccaacatggtgaaacccaggccctactaaaaatacaaaaattagctgggcatggtggcatgtagctatagtcccaggcactcaggaggctaaggcaggagaatgcttgaacccagaggcagaggttgcagtgagctgacatggtgccaatgtactccagcctgggcagcagagcaagactctttctccaaaaaaaaaaaaaaaagacataaaatttgtcttcgtaggtaattttgcaatatatttttagttgtattcaccttaacatgatcttatattctttctaaactaggaaatttagagggaaagaatattataagaaatgtttgtctaaatgtcacaacagagagagaagttaaaacaacaaagacctaggaagaatcaaagcttaagttgcaaaggaggttgaggaaagctaagatc

SEQ ID NO: 22 - DNA, 5910 bp, Homo sapiens
agatgcaggggcgcaaacgccaaaggagaccaggctgtaggaagagaagggcagagcgccggacagctcggcccgctccccgtcctttggggccgcggctggggaactacaaggcccagcaggcagctgcagggggcggaggcggaggagggaccagcgcgggtgggagtgagagagcgagccctcgcgccccgccggcgcatagcgctcggagcgctcttgcggccacaggcgcggcgtcctcggcggcgggcggcagctagcgggagccgggacgccggtgcagccgcagcgcgcggaggaacccgggtgtgccgggagctgggcggccacgtccggacgggaccgagacccctcgtagcgcattgcggcgacctcgccttccccggccgcgagcgcgccgctgcttgaaaagccgcggaacccaaggacttttctccggtccgagctcggggcgccccgcagggcgcacggtacccgtgctgcagtcgggcacgccgcggcgccggggcctccgcagggcgatggagcccggtctgcaaggaaagtgaggcgccgccgctgcgttctggaggaggggggcacaaggtctggagaccccgggtggcggacgggagccctccccccgccccgcctccggggcaccagctccggctccattgttcccgcccgggctggaggcgccgagcaccgagcgccgccgggagtcgagcgccggccgcggagctcttgcgaccccgccaggacccgaacagagcccgggggcggcgggccggagccggggacgcgggcacacgcccgctcgcacaagccacggcggactctcccgaggcggaacctccacgccgagcgagggtcagtttgaaaaggaggatcgagctcactgtggagtatccatggagatgtggagccttgtcaccaacctctaactgcagaactgggatgtggagctggaagtgcctcctcttctgggctgtgctggtcacagccacactctgcaccgctaggccgtccccgaccttgcctgaacaagcccagccctggggagcccctgtggaagtggagtccttcctggtccaccccggtgacctgctgcagcttcgctgtcggctgcgggacgatgtgcagagcatcaactggctgcgggacggggtgcagctggcggaaagcaaccgcacccgcatcacaggggaggaggtggaggtgcaggactccgtgcccgcagactccggcctctatgcttgcgtaaccagcagcccctcgggcagtgacaccacctacttctccgtcaatgtttcagttcccatagatgctctcccctcctcggaggatgatgatgatgatgatgactcctcttcagaggagaaagaaacagataacaccaaaccaaaccccgtagctccatattggacatccccagaaaagatggaaaagaaattgcatgcagtgccggctgccaagacagtgaagttcaaatgcccttccagtgggaccccaaaccccacactgcgctggttgaaaaatggcaaagaattcaaacctgaccacagaattggaggctacaaggtccgttatgccacctggagcatcataatggactctgtggtgccctctgacaagggcaactacacctgcattgtggagaatgagtacggcagcatcaaccacacataccagctggatgtcgtggagcggtcccctcaccggcccatcctgcaagcagggttgcccgccaacaaaacagtggccctgggtagcaacgtggagttcatgtgtaaggtgtacagtgacccgcagccgcacatccagtggctaaagcacatcgaggtgaatgggagcaagattggcccagacaacctgccttatgtccagatcttgaagcattcggggattaatagctcggatgcggaggtgctgaccctgttcaatgtgacagaggcccagagcggggagtatgtgtgtaaggtttccaattatattggtgaagctaaccagtctgcgtggctcactgtcaccagacctgtggcaaaagccctggaagagaggccggcagtgatgacctcgcccctgtacctggagatcatcatctattgcacaggggccttcctcatctcctgcatggtggggtcggtcatcgtctacaagatgaagagtggtaccaagaagagtgacttccacagccagatggctgtgcacaagctggccaagagcatccctctgcgcagacaggtaacagtgtctgctgactccagtgcatccatgaactctggggttcttctggttcggccatcacggctctcctccagtgggactcccatgctagcaggggtctctgagtatgagcttcccgaagaccctcgctgggagctgcctcgggacagactggtcttaggcaaacccctgggagagggctgctttgggcaggtggtgttggcagaggctatcgggctggacaaggacaaacccaaccgtgtgaccaaagtggctgtgaagatgttgaagtcggacgcaacagagaaagacttgtcagacctgatctcagaaatggagatgatgaagatgatcgggaagcataagaatatcatcaacctgctgggggcctgcacgcaggatggtcccttgtatgtcatcgtggagtatgcctccaagggcaacctgcgggagtacctgcaggcccggaggcccccagggctggaatactgctacaaccccagccacaacccagaggagcagctctcctccaaggacctggtgtcctgcgcctaccaggtggcccgaggcatggagtatctggcctccaagaagtgcatacaccgagacctggcagccaggaatgtcctggtgacagaggacaatgtgatgaagatagcagactttggcctcgcacgggacattcaccacatcgactactataaaaagacaaccaacggccgactgcctgtgaagtggatggcacccgaggcattatttgaccggatctacacccaccagagtgatgtgtggtctttcggggtgctcctgtgggagatcttcactctgggcggctccccataccccggtgtgcctgtggaggaacttttcaagctgctgaaggagggtcaccgcatggacaagcccagtaactgcaccaacgagctgtacatgatgatgcgggactgctggcatgcagtgccctcacagagacccaccttcaagcagctggtggaagacctggaccgcatcgtggccttgacctccaaccaggagtacctggacctgtccatgcccctggaccagtactcccccagctttcccgacacccggagctctacgtgctcctcaggggaggattccgtcttctctcatgagccgctgcccgaggagccctgcctgccccgacacccagcccagcttgccaatggcggactcaaacgccgctgactgccacccacacgccctccccagactccaccgtcagctgtaaccctcacccacagcccctgctgggcccaccacctgtccgtccctgtcccctttcctgctggcaggagccggctgcctaccaggggccttcctgtgtggcctgccttcaccccactcagctcacctctccctccacctcctctccacctgctggtgagaggtgcaaagaggcagatctttgctgccagccacttcatcccctcccagatgttggaccaacacccctccctgccaccaggcactgcctggagggcagggagtgggagccaatgaacaggcatgcaagtgagagcttcctgagctttctcctgtcggtttggtctgttttgccttcacccataagcccctcgcactctggtggcaggtgccttgtcctcagggctacagcagtagggaggtcagtgcttcgtgcctcgattgaaggtgacctctgccccagataggtggtgccagtggcttattaattccgatactagtttgctttgctgaccaaatgcctggtaccagaggatggtgaggcgaaggccaggttgggggcagtgttgtggccctggggcccagccccaaactgggggctctgtatatagctatgaagaaaacacaaagtgtataaatctgagtatatatttacatgtctttttaaaagggtcgttaccagagatttacccatcgggtaagatgctcctggtggctgggaggcatcagttgctatatattaaaaacaaaaaagaaaaaaaaggaaaatgtttttaaaaaggtcatatattttttgctacttttgctgttttatttttttaaattatgttctaaacctattttcagtttaggtccctcaataaaaattgctgctgcttcatttatctatgggctgtatgaaaagggtgggaatgtccactggaaagaagggacacccacgggccctggggctaggtctgtcccgagggcaccgcatgctcccggcgcaggttccttgtaacctcttcttcctaggtcctgcacccagacctcacgacgcacctcctgcctctccgctgcttttggaaagtcagaaaaagaagatgtctgcttcgagggcaggaaccccatccatgcagtagaggcgctgggcagagagtcaaggcccagcagccatcgaccatggatggtttcctccaaggaaaccggtggggttgggctggggagggggcacctacctaggaatagccacggggtagagctacagtgattaagaggaaagcaagggcgcggttgctcacgcctgtaatcccagcactttgggacaccgaggtgggcagatcacttcaggtcaggagtttgagaccagcctggccaacttagtgaaaccccatctctactaaaaatgcaaaaattatccaggcatggtggcacacgcctgtaatcccagctccacaggaggctgaggcagaatcccttgaagctgggaggcggaggttgcagtgagccgagattgcgccattgcactccagcctgggcaacagagaaaacaaaaaggaaaacaaatgatgaaggtctgcagaaactgaaacccagacatgtgtctgccccctctatgtgggcatggttttgccagtgcttctaagtgcaggagaacatgtcacctgaggctagttttgcattcaggtccctggcttcgtttcttgttggtatgcctccccagatcgtccttcctgtatccatgtgaccagactgtatttgttgggactgtcgcagatcttggcttcttacagttcttcctgtccaaactccatcctgtccctcaggaacggggggaaaattctccgaatgtttttggttttttggctgcttggaatttacttctgccacctgctggtcatcactgtcctcactaagtggattctggctcccccgtacctcatggctcaaactaccactcctcagtcgctatattaaagcttatattttgctggattactgctaaatacaaaagaaagttcaatatgttttcatttctgtagggaaaatgggattgctgctttaaatttctgagctagggattttttggcagctgcagtgttggcgactattgtaaaattctctttgtttctctctgtaaatagcacctgctaacattacaatttgtatttatgtttaaagaaggcatcatttggtgaacagaactaggaaatgaatttttagctcttaaaagcatttgctttgagaccgcacaggagtgtctttccttgtaaaacagtgatgataatttctgccttggccctaccttgaagcaatgttgtgtgaagggatgaagaatctaaaagtcttcataagtccttgggagaggtgctagaaaaatataaggcactatcataattacagtgatgtccttgctgttactactcaaatcacccacaaatttccccaaagactgcgctagctgtcaaataaaagacagtgaaattgacctga

SEQ ID NO: 23 - DNA, 4626 bp, Homo sapiens
gaattccgccctcgccgcccgcggcgccccgagcgctttgtgagcagatgcggagccgagtggagggcgcgagccagatgcggggcgacagctgacttgctgagaggaggcggggaggcgcggagcgcgcgtgtggtccttgcgccgctgacttctccactggttcctgggcaccgaaagataaacctctcataatgaaggcccccgctgtgcttgcacctggcatcctcgtgctcctgtttaccttggtgcagaggagcaatggggagtgtaaagaggcactagcaaagtccgagatgaatgtgaatatgaagtatcagcttcccaacttcaccgcggaaacacccatccagaatgtcattctacatgagcatcacattttccttggtgccactaactacatttatgttttaaatgaggaagaccttcagaaggttgctgagtacaagactgggcctgtgctggaacacccagattgtttcccatgtcaggactgcagcagcaaagccaatttatcaggaggtgtttggaaagataacatcaacatggctctagttgtcgacacctactatgatgatcaactcattagctgtggcagcgtcaacagagggacctgccagcgacatgtctttccccacaatcatactgctgacatacagtcggaggttcactgcatattctccccacagatagaagagcccagccagtgtcctgactgtgtggtgagcgccctgggagccaaagtcctttcatctgtaaaggaccggttcatcaacttctttgtaggcaataccataaattcttcttatttcccagatcatccattgcattcgatatcagtgagaaggctaaaggaaacgaaagatggttttatgtttttgacggaccagtcctacattgatgttttacctgagttcagagattcttaccccattaagtatgtccatgcctttgaaagcaacaattttatttacttcttgacggtccaaagggaaactctagatgctcagacttttcacacaagaataatcaggttctgttccataaactctggattgcattcctacatggaaatgcctctggagtgtattctcacagaaaagagaaaaaagagatccacaaagaaggaagtgtttaatatacttcaggctgcgtatgtcagcaagcctggggcccagcttgctagacaaataggagccagcctgaatgatgacattcttttcggggtgttcgcacaaagcaagccagattctgccgaaccaatggatcgatctgccatgtgtgcattccctatcaaatatgtcaacgacttcttcaacaagatcgtcaacaaaaacaatgtgagatgtctccagcatttttacggacccaatcatgagcactgctttaataggacacttctgagaaattcatcaggctgtgaagcgcgccgtgatgaatatcgaacagagtttaccacagctttgcagcgcgttgacttattcatgggtcaattcagcgaagtcctcttaacatctatatccaccttcattaaaggagacctcaccatagctaatcttgggacatcagagggtcgcttcatgcaggttgtggtttctcgatcaggaccatcaacccctcatgtgaattttctcctggactcccatccagtgtctccagaagtgattgtggagcatacattaaaccaaaatggctacacactggttatcactgggaagaagatcacgaagatcccattgaatggcttgggctgcagacatttccagtcctgcagtcaatgcctctctgccccaccctttgttcagtgtggctggtgccacgacaaatgtgtgcgatcggaggaatgcctgagcgggacatggactcaacagatctgtctgcctgcaatctacaaggttttcccaaatagtgcaccccttgaaggagggacaaggctgaccatatgtggctgggactttggatttcggaggaataataaatttgatttaaagaaaactagagttctccttggaaatgagagctgcaccttgactttaagtgagagcacgatgaatacattgaaatgcacagttggtcctgccatgaataagcatttcaatatgtccataattatttcaaatggccacgggacaacacaatacagtacattctcctatgtggatcctgtaataacaagtatttcgccgaaatacggtcctatggctggtggcactttacttactttaactggaaattacctaaacagtgggaattctagacacatttcaattggtggaaaaacatgtactttaaaaagtgtgtcaaacagtattcttgaatgttataccccagcccaaaccatttcaactgagtttgctgttaaattgaaaattgacttagccaaccgagagacaagcatcttcagttaccgtgaagatcccattgtctatgaaattcatccaaccaaatcttttattagtacttggtggaaagaacctctcaacattgtcagttttctattttgctttgccagtggtgggagcacaataacaggtgttgggaaaaacctgaattcagttagtgtcccgagaatggtcataaatgtgcatgaagcaggaaggaactttacagtggcatgtcaacatcgctctaattcagagataatctgttgtaccactccttccctgcaacagctgaatctgcaactccccctgaaaaccaaagcctttttcatgttagatgggatcctttccaaatactttgatctcatttatgtacataatcctgtgtttaagccttttgaaaagccagtgatgatctcaatgggcaatgaaaatgtactggaaattaagggaaatgatattgaccctgaagcagttaaaggtgaagtgttaaaagttggaaataagagctgtgagaatatacacttacattctgaagccgttttatgcacggtccccaatgacctgctgaaattgaacagcgagctaaatatagagtggaagcaagcaatttcttcaaccgtccttggaaaagtaatagttcaaccagatcagaatttcacaggattgattgctggtgttgtctcaatatcaacagcactgttattactacttgggtttttcctgtggctgaaaaagagaaagcaaattaaagatctgggcagtgaattagttcgctacgatgcaagagtacacactcctcatttggataggcttgtaagtgcccgaagtgtaagcccaactacagaaatggtttcaaatgaatctgtagactaccgagctacttttccagaagatcagtttcctaattcatctcagaacggttcatgccgacaagtgcagtatcctctgacagacatgtcccccatcctaactagtggggactctgatatatccagtccattactgcaaaatactgtccacattgacctcagtgctctaaatccagagctggtccaggcagtgcagcatgtagtgattgggcccagtagcctgattgtgcatttcaatgaagtcataggaagagggcattttggttgtgtatatcatgggactttgttggacaatgatggcaagaaaattcactgtgctgtgaaatccttgaacagaatcactgacataggagaagtttcccaatttctgaccgagggaatcatcatgaaagattttagtcatcccaatgtcctctcgctcctgggaatctgcctgcgaagtgaagggtctccgctggtggtcctaccatacatgaaacatggagatcttcgaaatttcattcgaaatgagactcataatccaactgtaaaagatcttattggctttggtcttcaagtagccaaagcgatgaaatatcttgcaagcaaaaagtttgtccacagagacttggctgcaagaaactgtatgctggatgaaaaattcacagtcaaggttgctgattttggtcttgccagagacatgtatgataaagaatactatagtgtacacaacaaaacaggtgcaaagctgccagtgaagtggatggctttggaaagtctgcaaactcaaaagtttaccaccaagtcagatgtgtggtcctttggcgtcgtcctctgggagctgatgacaagaggagccccaccttatcctgacgtaaacacctttgatataactgtttacttgttgcaagggagaagactcctacaacccgaatactgcccagaccccttatatgaagtaatgctaaaatgctggcaccctaaagccgaaatgcgcccatccttttctgaactggtgtcccggatatcagcgatcttctctactttcattggggagcactatgtccatgtgaacgctacttatgtgaacgtaaaatgtgtcgctccgtatccttctctgttgtcatcagaagataacgctgatgatgaggtggacacacgaccagcctccttctgggagacatcatagtgctagtactatgtcaaagcaacagtccacactttgtccaatggttttttcactgcctgacctttaaaaggccatcgatattctttgctccttgccataggacttgtattgttatttaaattactggattctaaggaatttcttatctgacagagcatcagaaccagaggcttggtcccacaggccagggaccaatgcgctgcag

SEQ ID NO: 24 - DNA, 5285 bp, Homo sapiens
ctgcaggaaggagagaggaagaggagcagaagggggcagcagcggacgccgctaacggcctccctcggcgctgacaggctgggccggcgcccggctcgcttgggtgttcgcgtcgccacttcggcttctcggccggtcgggcccctcggcccgggcttgcggcgcgcgtcggggctgagggctgctgcggcgcagggagaggcctggtcctcgctgccgagggatgtgagtgggagctgagcccacactggagggcccccgagggcccagcctggaggtcgttcagagccgtgcccgtcccggggcttcgcagaccttgacccgccgggtaggagccgcccctgcgggctcgagggcgcgctctggtcgcccgatctgtgtagccggtttcagaagcaggcaacaggaacaagatgtgaactgtttctcttctgcagaaaaagaggctcttcctcctcctcccgcgacggcaaatgttctgaaaaagactctgcatgggaatggcctgccttacgatgacagaaatggagggaacatccacctcttctatatatcagaatggtgatatttctggaaatgccaattctatgaagcaaatagatccagttcttcaggtgtatctttaccattcccttgggaaatctgaggcagattatctgacctttccatctggggagtatgttgcagaagaaatctgtattgctgcttctaaagcttgtggtatcacacctgtgtatcataatatgtttgctttaatgagtgaaacagaaaggatctggtatccacccaaccatgtcttccatatagatgagtcaaccaggcataatgtactctacagaataagattttactttcctcgttggtattgcagtggcagcaacagagcctatcggcatggaatatctcgaggtgctgaagctcctcttcttgatgactttgtcatgtcttacctctttgctcagtggcggcatgattttgtgcacggatggataaaagtacctgtgactcatgaaacacaggaagaatgtcttgggatggcagtgttagatatgatgagaatagccaaagaaaacgatcaaaccccactggccatctataactctatcagctacaagacattcttaccaaaatgtattcgagcaaagatccaagactatcatattttgacaaggaagcgaataaggtacagatttcgcagatttattcagcaattcagccaatgcaaagccactgccagaaacttgaaacttaagtatcttataaatctggaaactctgcagtctgccttctacacagagaaatttgaagtaaaagaacctggaagtggtccttcaggtgaggagatttttgcaaccattataataactggaaacggtggaattcagtggtcaagagggaaacataaagaaagtgagacactgacagaacaggatttacagttatattgcgattttcctaatattattgatgtcagtattaagcaagcaaaccaagagggttcaaatgaaagccgagttgtaactatccataagcaagatggtaaaaatctggaaattgaacttagctcattaagggaagctttgtctttcgtgtcattaattgatggatattatagattaactgcagatgcacatcattacctctgtaaagaagtagcacctccagccgtgcttgaaaatatacaaagcaactgtcatggcccaatttcgatggattttgccattagtaaactgaagaaagcaggtaatcagactggactgtatgtacttcgatgcagtcctaaggactttaataaatattttttgacttttgctgtcgagcgagaaaatgtcattgaatataaacactgtttgattacaaaaaatgagaatgaagagtacaacctcagtgggacaaagaagaacttcagcagtcttaaagatcttttgaattgttaccagatggaaactgttcgctcagacaatataattttccagtttactaaatgctgtcccccaaagccaaaagataaatcaaaccttctagtcttcagaacgaatggtgtttctgatgtaccaacctcaccaacattacagaggcctactcatatgaaccaaatggtgtttcacaaaatcagaaatgaagatttgatatttaatgaaagccttggccaaggcacttttacaaagatttttaaaggcgtacgaagagaagtaggagactacggtcaactgcatgaaacagaagttcttttaaaagttctggataaagcacacagaaactattcagagtctttctttgaagcagcaagtatgatgagcaagctttctcacaagcatttggttttaaattatggagtatgtgtctgtggagacgagaatattctggttcaggagtttgtaaaatttggatcactagatacatatctgaaaaagaataaaaattgtataaatatattatggaaacttgaagttgctaaacagttggcatgggccatgcattttctagaagaaaacacccttattcatgggaatgtatgtgccaaaaatattctgcttatcagagaagaagacaggaagacaggaaatcctcctttcatcaaacttagtgatcctggcattagtattacagttttgccaaaggacattcttcaggagagaataccatgggtaccacctgaatgcattgaaaatcctaaaaatttaaatttggcaacagacaaatggagttttggtaccactttgtgggaaatctgcagtggaggagataaacctctaagtgctctggattctcaaagaaagctacaattttatgaagataggcatcagcttcctgcaccaaagtgggcagaattagcaaaccttataaataattgtatggattatgaaccagatttcaggccttctttcagagccatcatacgagatcttaacagtttgtttactccagattatgaactattaacagaaaatgacatgttaccaaatatgaggataggtgccctggggttttctggtgcctttgaagaccgggatcctacacagtttgaagagagacatttgaaatttctacagcaacttggcaagggtaattttgggagtgtggagatgtgccggtatgaccctctacaggacaacactggggaggtggtcgctgtaaaaaagcttcagcatagtactgaagagcacctaagagactttgaaagggaaattgaaatcctgaaatccctacagcatgacaacattgtaaagtacaagggagtgtgctacagtgctggtcggcgtaatctaaaattaattatggaatatttaccatatggaagtttacgagactatcttcaaaaacataaagaacggatagatcacataaaacttctgcagtacacatctcagatatgcaagggtatggagtatcttggtacaaaaaggtatatccacagggatctggcaacgagaaatatattggtggagaacgagaacagagttaaaattggagattttgggttaaccaaagtcttgccacaagacaaagaatactataaagtaaaagaacctggtgaaagtcccatattctggtatgctccagaatcactgacagagagcaagttttctgtggcctcagatgtttggagctttggagtggttctgtatgaacttttcacatacattgagaagagtaaaagtccaccagcggaatttatgcgtatgattggcaatgacaaacaaggacagatgatcgtgttccatttgatagaacttttgaagaataatggaagattaccaagaccagatggatgcccagatgagatctatatgatcatgacagaatgctggaacaataatgtaaatcaacgcccctcctttagggatctagctcttcgagtggatcaaataagggataacatggctggatgaaagaaatgaccttcattctgagaccaaagtagatttacagaacaaagttttatatttcacattgctgtggactattattacatatatcattattatataaatcatgatgctagccagcaaagatgtgaaaatatctgctcaaaactttcaaagtttagtaagtttttcttcatgaggccaccagtaaaagacattaatgagaattccttagcaaggattttgtaagaagtttcttaaacattgtcagttaacatcactcttgtctggcaaaagaaaaaaaatagactttttcaactcagctttttgagacctgaaaaaattattatgtaaattttgcaatgttaaagatgcacagaatatgtatgtatagtttttaccacagtggatgtataataccttggcatcttgtgtgatgttttacacacatgagggctggtgttcattaatactgttttctaatttttccatagttaatctataattaattacttcactatacaaacaaattaagatgttcagataattgaataagtacctttgtgtccttgttcatttatatcgctggccagcattataagcaggtgtatacttttagcttgtagttccatgtactgtaaatatttttcacataaagggaacaaatgtctagttttatttgtataggaaatttccctgaccctaaataatacattttgaaatgaaacaagcttacaaagatataatctattttattatggtttcccttgtatctatttgtggtgaatgtgttttttaaatggaactatctccaaatttttctaagactactatgaacagttttcttttaaaattttgagattaagaatgccaggaatattgtcatcctttgagctgctgactgccaataacattcttcgatctctgggatttatgctcatgaactaaatttaagcttaagccataaaatagattagattgttttttaaaaatggatagctcattaagaagtgcagcaggttaagaattttttcctaaagactgtatatttgaggggtttcagaattttgcattgcagtcatagaagagatttatttcctttttagaggggaaatgaggtaaataagtaaaaaagtatgcttgttaattttattcaagaatgccagtagaaaattcataacgtgtatctttaagaaaaatgagcatacatcttaaatcttttcaattaagtataaggggttgttcgttgttgtcatttgttatagtgctactccactttagacaccatagctaaaataaaatatggtgggttttgtgtgtgtgtgtgtgtgtgtgtgtgtgtgtgtgtgtgtgttatttatacaaaacttaaaatacttgctgttttgattaaaaagaaaatagtttcttacttta

SEQ ID NO: 25 - DNA, 2949 bp, Homo sapiens
cgcctcccttccccctccccgcccgacagcggccgctcgggccccggctctcggttataagatggcggcgctgagcggtggcggtggtggcggcgcggagccgggccaggctctgttcaacggggacatggagcccgaggccggcgccggcgccggcgccgcggcctcttcggctgcggaccctgccattccggaggaggtgtggaatatcaaacaaatgattaagttgacacaggaacatatagaggccctattggacaaatttggtggggagcataatccaccatcaatatatctggaggcctatgaagaatacaccagcaagctagatgcactccaacaaagagaacaacagttattggaatctctggggaacggaactgatttttctgtttctagctctgcatcaatggataccgttacatcttcttcctcttctagcctttcagtgctaccttcatctctttcagtttttcaaaatcccacagatgtggcacggagcaaccccaagtcaccacaaaaacctatcgttagagtcttcctgcccaacaaacagaggacagtggtacctgcaaggtgtggagttacagtccgagacagtctaaagaaagcactgatgatgagaggtctaatcccagagtgctgtgctgtttacagaattcaggatggagagaagaaaccaattggttgggacactgatatttcctggcttactggagaagaattgcatgtggaagtgttggagaatgttccacttacaacacacaactttgtacgaaaaacgtttttcaccttagcattttgtgacttttgtcgaaagctgcttttccagggtttccgctgtcaaacatgtggttataaatttcaccagcgttgtagtacagaagttccactgatgtgtgttaattatgaccaacttgatttgctgtttgtctccaagttctttgaacaccacccaataccacaggaagaggcgtccttagcagagactgccctaacatctggatcatccccttccgcacccgcctcggactctattgggccccaaattctcaccagtccgtctccttcaaaatccattccaattccacagcccttccgaccagcagatgaagatcatcgaaatcaatttgggcaacgagaccgatcctcatcagctcccaatgtgcatataaacacaatagaacctgtcaatattgatgacttgattagagaccaaggatttcgtggtgatggaggatcaaccacaggtttgtctgctaccccccctgcctcattacctggctcactaactaacgtgaaagccttacagaaatctccaggacctcagcgagaaaggaagtcatcttcatcctcagaagacaggaatcgaatgaaaacacttggtagacgggactcgagtgatgattgggagattcctgatgggcagattacagtgggacaaagaattggatctggatcatttggaacagtctacaagggaaagtggcatggtgatgtggcagtgaaaatgttgaatgtgacagcacctacacctcagcagttacaagccttcaaaaatgaagtaggagtactcaggaaaacacgacatgtgaatatcctactcttcatgggctattccacaaagccacaactggctattgttacccagtggtgtgagggctccagcttgtatcaccatctccatatcattgagaccaaatttgagatgatcaaacttatagatattgcacgacagactgcacagggcatggattacttacacgccaagtcaatcatccacagagacctcaagagtaataatatatttcttcatgaagacctcacagtaaaaataggtgattttggtctagctacagtgaaatctcgatggagtgggtcccatcagtttgaacagttgtctggatccattttgtggatggcaccagaagtcatcagaatgcaagataaaaatccatacagctttcagtcagatgtatatgcatttggaattgttctgtatgaattgatgactggacagttaccttattcaaacatcaacaacagggaccagataatttttatggtgggacgaggatacctgtctccagatctcagtaaggtacggagtaactgtccaaaagccatgaagagattaatggcagagtgcctcaaaaagaaaagagatgagagaccactctttccccaaattctcgcctctattgagctgctggcccgctcattgccaaaaattcaccgcagtgcatcagaaccctccttgaatcgggctggtttccaaacagaggattttagtctatatgcttgtgcttctccaaaaacacccatccaggcagggggatatggtgcgtttcctgtccactgaaacaaatgagtgagagagttcaggagagtagcaacaaaaggaaaataaatgaacatatgtttgcttatatgttaaattgaataaaatactctctttttttttaaggtgaaccaaagaacacttgtgtggttaaagactagatataatttttccccaaactaaaatttatacttaacattggatttttaacatccaagggttaaaatacatagacattgctaaaaattggcagagcctcttctagaggctttactttctgttccgggtttgtatcattcacttggttattttaagtagtaaacttcagtttctcatgcaacttttgttgccagctatcacatgtccactagggactccagaagaagaccctacctatgcctgtgtttgcaggtgagaagttggcagtcggttagcctgggttagataaggcaaactgaacagatctaatttaggaagtcagtagaatttaataattctattattattcttaataatttttctataactatttctttttataacaatttggaaaatgtggatgtcttttatttccttgaagcaataaactaagtttctttttataaaaa

SEQ ID NO: 26 - DNA, 3248 bp, Homo sapiens
ggtaccgtaaccatggtcagctggggtcgtttcatctgcctggtcgtggtcaccatggcaaccttgtccctggcccggccctccttcagtttagttgaggataccacattagagccagaagagccaccaaccaaataccaaatctctcaaccagaagtgtacgtggctgcaccaggggagtcgctagaggtgcgctgcctgttgaaagatgccgccgtgatcagttggactaaggatggggtgcacttggggcccaacaataggacagtgcttattggggagtacttgcagataaagggcgccacgcctagagactccggcctctatgcttgtactgccagtaggactgtagacagtgaaacttggtacttcatggtgaatgtcacagatgccatctcatccggagatgatgaggatgacaccgatggtgcggaagattttgtcagtgagaacagtaacaacaagagagcaccatactggaccaacacagaaaagatggaaaagcggctccatgctgtgcctgcggccaacactgtcaagtttcgctgcccagccggggggaacccaatgccaaccatgcggtggctgaaaaacgggaaggagtttaagcaggagcatcgcattggaggctacaaggtacgaaaccagcactggagcctcattatggaaagtgtggtcccatctgacaagggaaattatacctgtgtggtggagaatgaatacgggtccatcaatcacacgtaccacctggatgttgtggagcgatcgcctcaccggcccatcctccaagccggactgccggcaaatgcctccacagtggtcggaggagacgtagagtttgtctgcaaggtttacagtgatgcccagccccacatccagtggatcaagcacgtggaaaagaacggcagtaaatacgggcccgacgggctgccctacctcaaggttctcaaggccgccggtgttaacaccacggacaaagagattgaggttctctatattcggaatgtaacttttgaggacgctggggaatatacgtgcttggcgggtaattctattgggatatcctttcactctgcatggttgacagttctgccagcgcctggaagagaaaaggagattacagcttccccagactacctggagatagccatttactgcataggggtcttcttaatcgcctgtatggtggtaacagtcatcctgtgccgaatgaagaacacgaccaagaagccagacttcagcagccagccggctgtgcacaagctgaccaaacgtatccccctgcggagacaggtaacagtttcggctgagtccagctcctccatgaactccaacaccccgctggtgaggataacaacacgcctctcttcaacggcagacacccccatgctggcaggggtctccgagtatgaacttccagaggacccaaaatgggagtttccaagagataagctgacactgggcaagcccctgggagaaggttgctttgggcaagtggtcatggcggaagcagtgggaattgacaaagacaagcccaaggaggcggtcaccgtggccgtgaagatgttgaaagatgatgccacagagaaagacctttctgatctggtgtcagagatggagatgatgaagatgattgggaaacacaagaatatcataaatcttcttggagcctgcacacaggatgggcctctctatgtcatagttgagtatgcctctaaaggcaacctccgagaatacctccgagcccggaggccacccgggatggagtactcctatgacattaaccgtgttcctgaggagcagatgaccttcaaggacttggtgtcatgcacctaccagctggccagaggcatggagtacttggcttcccaaaaatgtattcatcgagatttagcagccagaaatgttttggtaacagaaaacaatgtgatgaaaatagcagactttggactcgccagagatatcaacaatatagactattacaaaaagaccaccaatgggcggcttccagtcaagtggatggctccagaagccctgtttgatagagtatacactcatcagagtgatgtctggtccttcggggtgttaatgtgggagatcttcactttagggggctcgccctacccagggattcccgtggaggaactttttaagctgctgaaggaaggacacagaatggataagccagccaactgcaccaacgaactgtacatgatgatgagggactgttggcatgcagtgccctcccagagaccaacgttcaagcagttggtagaagacttggatcgaattctcactctcacaaccaatgaggaatacttggacctcagccaacctctcgaacagtattcacctagttaccctgacacaagaagttcttgttcttcaggagatgattctgttttttctccagaccccatgccttacgaaccatgccttcctcagtatccacacataaacggcagtgttaaaacatgaatgactgtgtctgcctgtccccaaacaggacagcactgggaacctagctacactgagcagggagaccatgcctcccagagcttgttgtctccacttgtatatatggatcagaggagtaaataattggaaaagtaatcagcatatgtgtaaagatttatacagttgaaaacttgtaatcttccccaggaggagaagaaggtttctggagcagtggactgccacaagccaccatgtaacccctctcacctgccgtgcgtactggctgtggaccagtaggactcaaggtggacgtgcgttctgccttccttgttaattttgtaataattggagaagatttatgtcagcacacacttacagagcacaaatgcagtatataggtgctggatgtatgtaaatatattcaaattatgtataaatatatattatatatttacaaggagttattttttgtattgattttaaatggatgtcccaatgcacctagaaaattggtctctctttttttaatagctatttgctaaatgctgttcttacacataatttcttaattttcaccgagcagaggtggaaaaatacttttgctttcagggaaaatggtataacgttaatttattaataaattggtaatatacaaaacaattaatcatttatagttttttttgtaatttaagtggcatttctatgcaggcagcacagcagactagttaatctattgcttggacttaactagttatcagatcctttgaaaagagaatatttacaatatatga

SEQ ID NO: 27 - DNA, 13562 bp, Homo sapiens
  misc_feature (2850)..(2850): where "n" is a or g or c or t
  misc_feature (3968)..(3968): where "n" is a or g or c or t
  misc_feature (4672)..(4672): where "n" is a or g or c or t
  misc_feature (5155)..(5155): where "n" is a or g or c or t
  misc_feature (7207)..(7207): where "n" is a or g or c or t
  misc_feature (7212)..(7212): where "n" is a or g or c or t
  misc_feature (8292)..(8292): where "n" is a or g or c or t
ttgaccagacaggtctcaaactcctgacctcaagtgatgcctcccacctgcacctccccaaaatggctgtgattacaggcataagccaccgcacccggcctccagcactcctttccatgccctccctgctcagaaggccaagcccctctgaccaggactgaggggctttttctctctgtgccccagggcaagttgcactcatggcacctccaagtgaagagacgcccctgatccctcagcgttcatgcagcctcttgtccacggaggctggtgccctgcatgtgctgttgcccgctcggggccccgggcccccccagcgactatctttctcctctggggaccacttggctgaggacctgtgcgtgcaggctgccaaggccagcggtgagtgcatccctagtggatcgggccagagggaaggatggggctgtgtggggccaagattggaagctggaatagttgcctgcagaagtcagcatcggagctggggctttgggggatgagtaggagttttgtaatggagaagggtgtgcagggttgccttctgagacagagggaatggcctgtgcagacggagaggtgtgacggcacatgaagggaacagctggtcataccttgaggtatggaaggatctggacggttgggtatgatgctggcactcctgaagggcacagatggggtgactcaggagggacctgatgggaccatccccctgtaggcatcctgcctgtgtaccactccctctttgctctggccacggaggacctgtcctgctggttccccccgagccacatcttctccgtggaggatgccagcacccaagtcctgctgtacaggattcggtcagcccccgcacaaggcggataggacagttagtatcagggtcctctgcatctctgctgggacccacaccccgagctcaggcgaggtctggtacactacccatttcatcagcgtgcacgcagggagagccagttgagggtccacccacgtcagcacaaggcacacacagagaggttaaaggtacaagctgggctctttgaggcctccgcagaatctgtccctcgcccccaccataatgtcactcctactgagggtgggttgcacttttcatcccagggttctctcctctcctcacagctctttttacttccccaattggtttgggctggagaagtgccaccgcttcgggctacgcaaggatttggccagtgctatccttgacctgccagtcctggagcacctctttgcccaggtggggttctgcctggggtttgaccagggggttgggggtccaatgggcaacatgaggactggcatgcaatcaggtggggcctcgtctgaccctccctgtggcagtccaggggtgggggtcagcccaggattgggggggtctgcaggttaacaacagggcttgaagttgggtggcctcagctgatgctccctgtggcggccccccagcaccgcagtgacctggtgagtgggcgcctccccgtgggcctcagtctcaaggagcagggtgagtgtctcagcctggccgtgttggacctggcccggatggcgcgagagcaggcccagcggccgggagagctgctgaagactgtcaggtgagagccaccaggctgtggggacgggctctgtttgggagtgagcaacgtgggctccatcgggggtttggcgggctcccaccatggagttctcctgcaagctttcagggtgttcctatgacccaggggctcccacgaacccaggcctctccacccccaggctccagctggacagacacctgacctcccccagctaaaaggcctgtggggtccctgtccgacctgtgggcggcaatggccctcccctactctgaggtccggtcctcatacctgaccctgaatgagagtctgtgtgtgcctggtgccccaactagggccgcaccccagcccctgggctaaagcctgggtttgtgtgtgtaccccgcggggacccctcccgacgctgaggaccgggtccctcccctccaacccctgcagctacaaggcctgcctacccccaagcctgcgcgacctgatccagggcctgagcttcgtgacgcggagggctattcggaggacggtgcgcagagccctgccgcgcgtggccgcctgccaggcagaccggcactcgctcatggccaagtacatcatggacctggagcggctggatccagccggggccgccgagaccttccacgtgggcctccctggggcccttggtggccacgacgggctggggctgttccgcgtggctggtgacggcggcatcgcctggacccagggagaacagggtgaggacggcttcccccctggcggggccaaatgggggggggtttggggaggggccggagatttgtaggggatgtggggcggagccaaaacgaaagacttggggaagtgggcgaggcttaatgaggggcggggcttagtgagggaggagactgcgggaatgggaggggcaaactgagtgaagggttgggctgagcgacccgggaatgaaaatgggaggggttgaggagtgggtgggtgggcgctggaacgaggcaagactaagaggcagagtgaggctccgagagctgggaggctgcgaagcggggcagggatcaaggggcggggtccggcagagagaaggaggcggggattggcagagcgggtgggagatgtttggggatgggtaggggaggtgttgagaggttggagttgataggagggggcgcggcttggaagggttgaatggcaaagggatagggagtggatggtgtggcttgggggtgggttgcatgggcgtggtttggcgggacccgctgggccccactacggtaanccccaacaacccagtcctccagcccttctgcgactttccagaaatcgtagacattagcatcaagcaggccccgcgcgttggcccggccggagagcaccgcctggtcactgttaccaggacagacaaccagattttaggtggtgcaggattcccctcccccttcagccttaccccgaagggcgggaccggcaccctcgggtttcactgggctctgacgcttgtccctcgcagaggccgagttcccagggctgcccgaggctctgtcgttcgtggcgctcgtggacggctacttccggctgaccacggactcccagcacttcttctgcaaggaggtggcaccgccgaggctgctggaggaagtggccgagcagtgccacggccccatcactctggactttgccatcaacaagctcaagactgggggctcacgtcctggctcctatgttctccgccgcagcccccaggactttgacagcttcctcctcactgtctgtgtccaggtcggtctactgctagggtgggtagtggagggctgcctggacaagaggttacctctgaattgagatttactcagaatctactcagcatttggttcctcgaacaaaatgagggaaccgacacccccggttaaggcgaacagcgtattctctggtctaaatactggaattagttcgtggtgcttcaggataaaagactgaagctgggcgctgtcgggtccccctgttatcccagccctttgggaggctgacgtaagcatatcccgagatcgggatatccaccccatcctggtccaaatggttaaaccctgtctccactgtaaatatgtaactcagctgggcatggtaatgggcatctgttaatcccacctactcgggaagctcaaggcatgttttctaaggtttttaaaaaaggggggggggttttttggggtttttaggggaaaaaaaaaaggggtgggggaaaaaaggggtaaaaccctttttttagtcttcgagagctcctggcaacctgctgggatggggggctgcacgtagatggggtggcagtgaccctcacttcctgctgtaccccaaaattgggggggtggggttggccagtttaaaggtttaagggttggnaaccttcggggcccaaaagggggaaccccctttttttttaaaaaattaaaaatttttggggggggtaagggggatttttttttcccccaaaattgggggggggggccggggcatttttttaaccccggggggggggggttccaggggcccaggataaaccctttaaattcccccccggggaaaaggcccaaattctttttcccaaaaaaaaaaaaaaaaagaaaaaaaaggaagaaggactgagaaggagagtgtctgtcgctcagtcccactcaggggccactcttctttgcagaacccccttggtcctgattataagggctgcctcatccggcgcagccccacaggaaccttccttctggttggcctcagccgaccccacagcagtcttcgagagctcctggcaacctgctgggatggggggctgcacgtagatggggtggcagtgaccctcacttcctgctgtatccccagacccaaaggtgaggccccttggtcccctggaatgagtggctgatctgggaccctggtttcctatgtctgataacagctcctgtgtggatggcaagtggtagaaactgcagatcatggtgggttagggaagaaagggcgatttgttgcttcaggaagttagagccatctaacccctagggctggattgcccacggtacagctagatgtgagccatgtcacctggaccttgntttatctccagaatctcagttctttcttcttgggtggactttcactccttggcacaaactcccccctgtatggggacaaattacttgagtatgttggagcccctttcctgagttcttcccagcaattcctcggtaaggaacccgattcccctgggctcgctccaacaagtgtctaactttggcttcaattaatacggcccccctgaaagggggtttccttcccttccccctgggggggtttcaccccccaaacaattccctcattggggggggtcttctttggatttttccctttcccaaaataaaaacccattgtataagttggcgccaccaggaaagatgggaaggtgggaagggagagaagatgcgggggtttcttccactccaataatcccaaattttgtgttcacagacctgccttaggggaaaacctggccacaggtcacctttggccctggagtttgccattagtgcacacagcantaccatgatttttttgatacgggacagaagttcccactatcatctatggctttttgttttgattcgctttgtttttgagacagagtctccttctgtcacccaggctggagtgcagcggcgcgattttgatttactgcaacctccgcttcccagattcaagcaattcttcctgcttcagcctcccgagtagctgggattaacaggcatgcaccaccacgcccggctaattttgtatttttagtagagacggggtttcttccatgttggtcaggctggtctcgaactcccgacctcagatgatctgcccgcctcagcctcccaaagtgctgggattacaggcgtgagccaccgcgcccggcctaaaatttttttgtcaagacgaggtctcgctatgttgcctaggctgtttttgaactcgtggcttcaaaccatcctcctgctcagctcccaaagtgttggagacagggttttccccgttccttttaaaaaccaacccaccccggccccaattgtgtgaaccttttatttaacaccccaaacttttgcggggggaggggggggtttagtccccccggggtctttttggggtttggcaaccccggccccctaaaaaaagggggcaaacccttttttccgcctaaaaaaaagaaaaaagagtgtgggagggttgaaaaaattctgttttttcccataaatccgtggggaggggccggggggcttactttgaccccgggggtccgggtgtggttctcctccgataaaaccacagaatttccccccggggaaacccggggaatttttttttttttaaagaacaaaaaaaaaattagccgggcacggtggcacacacctgtagtcccagctattcgggaggccgaggcaggaaaatcgcttgaacctgggaggtggaggttgcagtgagctgagatcgcaccattgcccacccagccttgatgacagagtgagatccgtctcagcagcagcagcaacagcaaaacaaaaacaacaacaaaaagccatgtgccctgaagtcttcatctcagggtcgggttctagagggtacctcaaactaaggcatgagttagctaacccttggggacttttcacctctgatttctggtttttctccctcatcctctccccatagaaaagtccaacctgatcgtggtccagagaggtcacagcccacccacatcatccttggttcagccccaatcccaataccagctgagtcagatgacatttcacaagatccctgctgacagcctggagtgggtaagaggccctgggaaatgaggcgatacctcagtctggggtccagagactcagatgcgtggcctcaggcatatgctataattttaccttgcctcggttttcccatctgtaaaatggggccagcagctatgtctcgcttgggctgggatcctgcaggaaccccctcactggcctcttctgctgtcccctcaccattcagcatgagaacctgggccatgggtccttcaccaagatttaccggggctgtcgccatgaggtggtggatggggaggcccgaaagacagaagtgctgctgaaggtcatggatgccaagcacaagaactgcatggaggtgagaggcaatgtggaccagacttttggagtcgggggctggcttgagcggggctcgtggatgcagagacatttacaaacacacagggacctgggcgtggtggctgatgcctgcacatcatagcggggactcgtcttgacaaaaaaattttaggccgggcgcggtggctcacgcctgtaatcccagcactttgggaagctgaagcgggcagaatcatcgaggtggggagtctcgagaccaacctgcccaaacatggagaaaccccgtctctactaaaaaacccaaaattacccgggcgtggtggtgcatgcctgtaatcccagctactcgggagtctgaggcaggagaattccttgaatctgggaagcggaggttccagtgagtcaagatcgcgccactgcactccagcctgggtgacagagggagactctgtctcaaaaacaaancaaancaaaacaaaaaaccatagatgatagtgggaacttctgtcccgtatcagaaaatcatggtagtgctgtgtgcactaatggcagactccagggccaaaggtgacctgtggccaggtgttcccctaaggcaggtctgtgagcacaaaatttgggattattggagtggaagaaacccacgcatcttctctcccttcccaccttccccagtcattcctggaagcagcgagcttgatgagccaagtgtcgtaccggcatctcgtgctgctccacggcgtgtgcatggctggagacaggtgagtgctcctagggggtgttaaaggggagagggaggaaaagagggcgaggggggaaagagagctagggggcagagaggagagagaaagccggggagaggccaacgggagcaaccaagaggaggttagcgagaggataaaaaactggcctgacgtttataaaagataggggggaggaagcctgccctcgaggcaaattatataggcccggaggaggagcttctggcttgggggggggctgagagggagaccccgcccctttaacaaaactagaaagaccctgggggataatcccccgcttattataaacctggagagaactcaacgaaaaagagatcccctgggatgcccccagatatatttcgggagtgcgcaaagaactaaacttggaatactgagcaaatatgggctgagcaccatggtgcaggaatttgtacacctgggggccatagacatgtatctgcgaaaacgtggccacctggtgccagccagctggaagctgcaggtggtcaaacagctggcctacgccctcaactatctggtgagtgctcctccccccaggggatttggtttggggggagggggggggtttaaaaaaacccaaccccctaaattttgggggggggttggtgggctgttccccctccattccccgggaaagtttttttttttttaaaggggaaaagggaatggttttttttttttaaaagattgtgtaaggtttggggggggggcattttagtttcttttttgggaaaaatggaagaaaaaattttttttttttttttngggttttggggaaaagggggtggccgggaagaaggttttcttttttgaggaaaagggacatggcccttcaccctggagtgggttttttcatgaaaagaagggaggagggattcggtttggggaagaccaaaagcaaagccgcgcgggaagaaagggagtatttcccctgggccctatcagccatttccgttgccaggagacaagggaaaaagtggggaagggaattaattggaagcttggagcagggccctggaatcccaggtgaggaggtttaattttttttcaaaggcattggggttaacaggatggggtggtgtttgagagggggaggacatagacatgtcatttttgggggtgaagtagaggggcaagacaggatatcaggatttcagggacgatggtggagcatgtttgagcagtaccaagtgggttttgaaggatgtataggagtttgccaaacagactcttcattttatcaaacctcccgggcattttcgtgtgtttggcccccttaggaggacaaaggcctgccccatggcaatgtctctgcccggaaggtgctcctggctcgggagggggctgatgggagcccgcccttcatcaagctgagtgaccctggggtcagccccgctgtgttaagcctggaggtaagttcctggaggtggaggagggaggggctgaacagggcaaggaagtggatccctgatcccactttcattccctcagatgctcaccgacaggatcccctgggtggcccccgagtgtctccgggaggcgcagacacttagcttggaagctgacaagtggggcttcggcgccacggtctgggaagtgtttagtggcgtcaccatgcccatcagtgccctggatcctgctaaggtcagagcccctcacccggcatcggtctccgaacccccactttgacagccgggcagactgacatccagtctggggagattggggtgggtctattgggttggggattaccgactgctcctctcaccctcagaaactccaattttatgaggaccggcagcagctgccggcccccaagtggacagagctggccctgctgattcaacagtgcatggcctatgagccggtccagaggccctccttccgagccgtcattcgtgacctcaatagcctcatctcttcaggtgcccgctgggacgggttgggtggggagggctgtgatgtcatattgggcccagtggaaggagcgtggtttgcagtaggccacggcctgtgtgtctggtgaggttggaggggttgatgactatgacagacagtgtgagcttcaacagctactgtaacgaacagtcccctcagttcaaggttcaacatgatgatattttatttatttatttattttggagacagagtcttgctctgttgcctaggctggagtgcagtggcacaatttcggctcactggaacctctacctccttgaacctctagttcaagcgattctcctgcctcagactcctgagtagctgggattacaggtgtgtgccaccacgcccagctaattttttggttttttttgggaagattttggggtttcaaccatatttggctagggtggtcttcgaactcttgaccccaaggtgatcccgcccacctctacctcctaaaagtgctgggattcaaatttcttcgtacttggctttgttttgataattgccaaattagtcgagatataggtttgccacagtagagtcatggatttcagttctgtgagactttgtaaacaagaagtttcaagtgtcaaaggaggaaccgggatttgtttataaataaacctgcagtattaataggaatcacataataaatgactcagtataataccagggaggaacacccaaataagtttaagttgccctaaagaaaagaaaaatgcggtgatggtaaaaataatttaaagtcccagccaaacaattataagcgtataagattctgtaaaactgaaacataagcaaaatccacacaaagaacccaaaaacgacctacgacatcatttcaaagtgttgaaatgtcgattctttcttcaattttgggctgttccctccttcacaattcatcttttcaaaagggcattttgaagagtattacggtagaggaaggtggtgtctctatctcgtccaactatggggcaatggcagagtgaccgtgaaatataggcatttttgatcgagtcgacgccctatagtgagtcgtatagagctctagtatatagaaccgcaggaaaattgatgttcctcaatttattgcccccccatccttttgtaacccaattgtgggaagttggcaccagggttttgcacctgcacggagggaggccttccttttcccctggaaacaagagtgggaagacacctttttttccagtcctccacaaggtacccttttggcttgcaatggccctgccataatgcacagagagggtcaatatgcagatggaggttgcacaccaagtcaaactcaggagtgggacccaggatgagaggcgctgcttaccactgcccatgcccccaccccacgaactatgagctcctctcagaccccacacctggtgccctggcacctcgtgatggtctgtggaatggtgcccagctctatgcctgccaagaccccacgatcttcgaggagagacacctcaagtacatctcacagctgggcaaggtaaggtgggcagggccagggtgggttggagaggcagggcagcatccaggtacctggacatcagtgccgctatcctcgagggcaactttggcagcgtggagctgtgccgctatgacccgctaggcgacaatacaggtgccctggtggccgtgaaacagctgcagcacagcgggccagaccagcagagggactttcagcgggagattcagatcctcaaagcactgcacagtgatttcattgtcaagtatcgtggtgtcagctatggcccgggtgagccagctcccggatgagtgaaccaagacgtatgggtgcttttcaaagtgcacattcttaccctcctgccaggccactttaggtaggctgggaacgtgattattgatccagattcacatgggttacaggtttgaatcctgactctaccccttaccagttgtgaaaccttaacttttctgagcctcagtttctccagctgaaaaatgggccattgtgatatttactttgttgtttgttgttgtttgtttgttttttttgagacagagtctcgctctgtcacccaggctggaaggcagtggctcaatctcggctcactgcaacctctgccttccaagttcaagtgattctcctgccctcagcctccataataacctgggattaacaggacgttctccagataactgggatacagggagcgtgccacacacccggctaatttttgttgttttagtggagatgggttttcaccatgttggccaggctggtcttgaactcctgacctcaagtgaggcttccaaagtgctgggattacaggcgtgagccactgcacctggccgtgatatataaacacatcaatgtatgttgtagaaagtactcaagagatattagcaatgtgtcattgttgcggttcccatattacagtcagcaaaactgaggtcgagagggacacaaggtcccactgtgaaaggggggaagaatggggggacgagcagggctgggccctgctgtgacagatcctgccttctccaggccgccagagctgcggctggtcatggagtacctgcccagcggctgcttgcgcgacttcctgcagcggcaccgcgcgcgcctcgatgccagccgcctccttctctattcctcgcagatctgcaaggtgagagggggcgccccgggacttgtggggattcagctggcacggcctgggcaggggtctgcttggaggtcgcggtgaaggctgaggagtggtttggggtccaggtctcgggagtggtggggttggcttagggctcaggatcagaacttcagtggaggatggctcgggggtagggttatagttggggtctgggttggggtgccaggtcacgcttgggggtacctgccggattatcctgggatcctctcttcaagatcacaacgaccccccccagggcatggagtacctgggctcccgccgctgcgtgcaccgcgacctggccgcccgaaacatcctcgtggagagcgaggcacacgtcaagatcgctgacttcggcctagctaagctgctgccgcttgacaaagactactacgtggtccgcgagccaggccagagccccattttctggtatgcccccgaatccctctcggacaacatcttctctcgccagtcagacgtctggagcttcggggtcgtcctgtacgagctcttcacctactgcgacaaaagctgcagcccctcggccgagttcctgcggatgatgggatgtgagcgggatgtccccgccctctgccgcctcttggaactgctggaggagggccagaggctgccggcgcctcctgcctgccctgctgaggttcacgagctcatgaagctgtgctgggcccctagcccacaggaccggccatcattcagcgccctgggcccccagctggacatgctgtggagcggaagccgggggtgtgagactcatgccttcactgctcacccagagggcaaacaccactccctgtccttttcatagctcctgcccgcagacctctggattaggtctctgttgactggctgtgtgaccttaggcccggagctgcccctctctgggcctcagaggccttatgagggtcctctacttcaggaacacccccatgacattgcatttgggggggctcccgtggcctgtagaatagcctgtggcctttgcaatttgttaaggttcaagacagatgggcatatgtgtcagtggggggctctctgagtcctggcccaaagaagcaaggaaccaaatttaagactctcgcattttcccaaccccttaagccctggccccctgagtttccttttctcgtctctctctttttattttttttatttttatttttatttttgagacagagcctcgctcgttacccagggtggagtgcagtggtagcgatctcggctcacagtgcaacctctgcctcccaggttcaagcgattctcctgcctcagcctcccgagtagctgggattacaggtgtgcaccaccacgcccggctaattttttttatttttaatagagatgaggtttcaccatgatggccaggctggtctcgaactcctaacctcaagtgatcccacc

SEQ ID NO: 28 - DNA, 6378 bp, Homo sapiens
cccattactgttggagctacagggagagaaacaggaggagactgcaagagatcatttgggaaggccgtgggcacgctctttactccatgtgtgggacattcattgcggaataacatcggaggagaagtttcccagagctatggggacttcccatccggcgttcctggtcttaggctgtcttctcacagggctgagcctaatcctctgccagctttcattaccctctatccttccaaatgaaaatgaaaaggttgtgcagctgaattcatccttttctctgagatgctttggggagagtgaagtgagctggcagtaccccatgtctgaagaagagagctccgatgtggaaatcagaaatgaagaaaacaacagcggcctttttgtgacggtcttggaagtgagcagtgcctcggcggcccacacagggttgtacacttgctattacaaccacactcagacagaagagaatgagcttgaaggcaggcacatttacatctatgtgccagacccagatgtagcctttgtacctctaggaatgacggattatttagtcatcgtggaggatgatgattctgccattataccttgtcgcacaactgatcccgagactcctgtaaccttacacaacagtgagggggtggtacctgcctcctacgacagcagacagggctttaatgggaccttcactgtagggccctatatctgtgaggccaccgtcaaaggaaagaagttccagaccatcccatttaatgtttatgctttaaaagcaacatcagagctggatctagaaatggaagctcttaaaaccgtgtataagtcaggggaaacgattgtggtcacctgtgctgtttttaacaatgaggtggttgaccttcaatggacttaccctggagaagtgaaaggcaaaggcatcacaatgctggaagaaatcaaagtcccatccatcaaattggtgtacactttgacggtccccgaggccacggtgaaagacagtggagattacgaatgtgctgcccgccaggctaccagggaggtcaaagaaatgaagaaagtcactatttctgtccatgagaaaggtttcattgaaatcaaacccaccttcagccagttggaagctgtcaacctgcatgaagtcaaacattttgttgtagaggtgcgggcctacccacctcccaggatatcctggctgaaaaacaatctgactctgattgaaaatctcactgagatcaccactgatgtggaaaagattcaggaaataaggtatcgaagcaaattaaagctgatccgtgctaaggaagaagacagtggccattatactattgtagctcaaaatgaagatgctgtgaagagctatacttttgaactgttaactcaagttccttcatccattctggacttggtcgatgatcaccatggctcaactgggggacagacggtgaggtgcacagctgaaggcacgccgcttcctgatattgagtggatgatatgcaaagatattaagaaatgtaataatgaaacttcctggactattttggccaacaatgtctcaaacatcatcacggagatccactcccgagacaggagtaccgtggagggccgtgtgactttcgccaaagtggaggagaccatcgccgtgcgatgcctggctaagaatctccttggagctgagaaccgagagctgaagctggtggctcccaccctgcgttctgaactcacggtggctgctgcagtcctggtgctgttggtgattgtgatcatctcacttattgtcctggttgtcatttggaaacagaaaccgaggtatgaaattcgctggagggtcattgaatcaatcagcccggatggacatgaatatatttatgtggacccgatgcagctgccttatgactcaagatgggagtttccaagagatggactagtgcttggtcgggtcttggggtctggagcgtttgggaaggtggttgaaggaacagcctatggattaagccggtcccaacctgtcatgaaagttgcagtgaagatgctaaaacccacggccagatccagtgaaaaacaagctctcatgtctgaactgaagataatgactcacctggggccacatttgaacattgtaaacttgctgggagcctgcaccaagtcaggccccatttacatcatcacagagtattgcttctatggagatttggtcaactatttgcataagaatagggatagcttcctgagccaccacccagagaagccaaagaaagagctggatatctttggattgaaccctgctgatgaaagcacacggagctatgttattttatcttttgaaaacaatggtgactacatggacatgaagcaggctgatactacacagtatgtccccatgctagaaaggaaagaggtttctaaatattccgacatccagagatcactctatgatcgtccagcctcatataagaagaaatctatgttagactcagaagtcaaaaacctcctttcagatgataactcagaaggccttactttattggatttgttgagcttcacctatcaagttgcccgaggaatggagtttttggcttcaaaaaattgtgtccaccgtgatctggctgctcgcaacgtcctcctggcacaaggaaaaattgtgaagatctgtgactttggcctggccagagacatcatgcatgattcgaactatgtgtcgaaaggcagtacctttctgcccgtgaagtggatggctcctgagagcatctttgacaacctctacaccacactgagtgatgtctggtcttatggcattctgctctgggagatcttttcccttggtggcaccccttaccccggcatgatggtggattctactttctacaataagatcaagagtgggtaccggatggccaagcctgaccacgctaccagtgaagtctacgagatcatggtgaaatgctggaacagtgagccggagaagagaccctccttttaccacctgagtgagattgtggagaatctgctgcctggacaatataaaaagagttatgaaaaaattcacctggacttcctgaagagtgaccatcctgctgtggcacgcatgcgtgtggactcagacaatgcatacattggtgtcacctacaaaaacgaggaagacaagctgaaggactgggagggtggtctggatgagcagagactgagcgctgacagtggctacatcattcctctgcctgacattgaccctgtccctgaggaggaggacctgggcaagaggaacagacacagctcgcagacctctgaagagagtgccattgagacgggttccagcagttccaccttcatcaagagagaggacgagaccattgaagacatcgacatgatggacgacatcggcatagactcttcagacctggtggaagacagcttcctgtaactggcggattcgaggggttccttccacttctggggccacctctggatcccgttcagaaaaccactttattgcaatgcggaggttgagaggaggacttggttgatgtttaaagagaagttcccagccaagggcctcggggagcgttctaaatatgaatgaatgggatattttgaaatgaactttgtcagtgttgcctctcgcaatgcctcagtagcatctcagtggtgtgtgaagtttggagatagatggataagggaataataggccacagaaggtgaactttgtgcttcaaggacattggtgagagtccaacagacacaatttatactgcgacagaacttcagcattgtaattatgtaaataactctaaccaaggctgtgtttagattgtattaactatcttctttggacttctgaagagaccactcaatccatccatgtacttccctcttgaaacctgatgtcagctgctgttgaactttttaaagaagtgcatgaaaaaccatttttgaaccttaaaaggtactggtactatagcattttgctatcttttttagtgttaagagataaagaataataattaaccaaccttgtttaatagatttgggtcatttagaagcctgacaactcattttcatattgtaatctatgtttataatactactactgttatcagtaatgctaaatgtgtaataatgtaacatgatttccctccagagaaagcacaatttaaaacaatccttactaagtaggtgatgagtttgacagtttttgacatttatattaaataacatgtttctctataaagtatggtaatagctttagtgaattaaatttagttgagcatagagaacaaagtaaaagtagtgttgtccaggaagtcagaatttttaactgtactgaataggttccccaatccatcgtattaaaaaacaattaactgccctctgaaataatgggattagaaacaaacaaaactcttaagtcctaaaagttctcaatgtagaggcataaacctgtgctgaacataacttctcatgtatattacccaatggaaaatataatgatcagcaaaaagactggatttgcagaagttttttttttttttcttcatgcctgatgaaagctttggcaaccccaatatatgtattttttgaatctatgaacctgaaaagggtcagaaggatgcccagacatcagcctccttctttcaccccttaccccaaagagaaagagtttgaaactcgagaccataaagatattctttagtggaggctggatgtgcattagcctggatcctcagttctcaaatgtgtgtggcagccaggatgactagatcctgggtttccatccttgagattctgaagtatgaagtctgagggaaaccagagtctgtatttttctaaactccctggctgttctgatcggccagttttcggaaacactgacttaggtttcaggaagttgccatgggaaacaaataatttgaactttggaacagggttggaattcaaccacgcaggaagcctactatttaaatccttggcttcaggttagtgacatttaatgccatctagctagcaattgcgaccttaatttaactttccagtcttagctgaggctgagaaagctaaagtttggttttgacaggttttccaaaagtaaagatgctacttcccactgtatgggggagattgaactttccccgtctcccgtcttctgcctcccactccataccccgccaaggaaaggcatgtacaaaaattatgcaattcagtgttccaagtctctgtgtaaccagctcagtgttttggtggaaaaaacattttaagttttactgataatttgaggttagatgggaggatgaattgtcacatctatccacactgtcaaacaggttggtgtgggttcattggcattctttgcaatactgcttaattgctgataccatatgaatgaaacatgggctgtgattactgcaatcactgtgctatcggcagatgatgctttggaagatgcagaagcaataataaagtacttgactacctactggtgtaatctcaatgcaagccccaactttcttatccaactttttcatagtaagtgcgaagactgagccagattggccaattaaaaacgaaaacctgactaggttctgtagagccaattagacttgaaatacgtttgtgtttctagaatcacagctcaagcattctgtttatcgctcactctcccttgtacagccttattttgttggtgctttgcattttgatattgctgtgagccttgcatgacatcatgaggccggatgaaacttctcagtccagcagtttccagtcctaacaaatgctcccacctgaatttgtatatgactgcatttgtgggtgtgtgtgtgttttcagcaaattccagatttgtttccttttggcctcctgcaaagtctccagaagaaaatttgccaatctttcctactttctatttttatgatgacaatcaaagccggcctgagaaacactatttgtgactttttaaacgattagtgatgtccttaaaatgtggtctgccaatctgtacaaaatggtcctatttttgtgaagagggacataagataaaatgatgttatacatcaatatgtatatatgtatttctatatagacttggagaatactgccaaaacatttatgacaagctgtatcactgccttcgtttatatttttttaactgtgataatccccacaggcacattaactgttgcacttttgaatgtccaaaatttatattttagaaataataaaaagaaagatacttacatgttcccaaaacaatggtgtggtgaatgtgtgagaaaaactaacttgatagggtctaccaatacaaaatgtattacgaatgcccctgttcatgtttttgttttaaaacgtgtaaatgaagatctttatatttcaataaatgatatataatttaaagtt

SEQ ID NO: 29 - DNA, 3286 bp, Homo sapiens
gcgtgtcgggcgcggaagggggaggcggcccggggcgcccgcgagtgaggcgcggggcggcgaagggagcgcgggtggcggcacttgctgccgcggccttggatgggctgggcccccctcgccgctccgcctcctccacacgcgcggcggccgcggcgagggggacgcgccgcccggggcccggcaccttcgggaaccccccggcccggagcctgcggcctgcgccgcctcggccgccgggagccccgtggagcccccgccgccgcgccgccccgcggaccggacgctgagggcactcggggcggggcgcgcgctcgggcagacgtttgcggggaggggggcgcctgccgggccccggcgaccaccttgggggtcgcgggccggctcggggggcgcccagtgcgggccctcgcgggcgccgggcagcgaccagccctgagcggagctgttggccgcggcgggaggcctcccggacgcccccagccccccgaacgctcgcccgggccggcgggagtcggcgccccccgggaggtccgctcggtcgtccgcggcggagcgtttgctcctgggacaggcggtgggaccggggcgtcgccggagacgcccccagcgaagttgggctctccaggtgtgggggtcccggggggtagcgacgtcgcggacccggcctgtgggatgggcggcccggagaagactgcgctcggccgtgttcatacttgtccgtgggcctgaggtccccggaggatgacctagcactgaaaagccccggccggcctccccagggtccccgaggacgaagttgaccctgaccgggccgtctcccagttctgaggcccgggtcccactggaactcgcgtctgagccgccgtcccggacccccggtgcccgccggtccgcagaccctgcaccgggcttggactcgcagccgggactgacgtgtagaacaatcgtttctgttggaagaagggtttttcccttccttttggggtttttgttgccttttttttttcttttttctttgtaaaattttggagaagggaagtcggaacacaaggaaggaccgctcacccgcggactcagggctggcggcgggactccaggaccctgggtccagcatggaggtggtggacccgcagcagctgggcatgttcacggagggcgagctgatgtcggtgggtatggacacgttcatccaccgcatcgactccaccgaggtcatctaccagccgcgccgcaagcgggccaagctcatcggcaagtacctgatgggggacctgctgggggaaggctcttacggcaaggtgaaggaggtgctggactcggagacgctgtgcaggagggccgtcaagatcctcaagaagaagaagttgcgaaggatccccaacggggaggccaacgtgaagaaggaaattcaactactgaggaggttacggcacaaaaatgtcatccagctggtggatgtgttatacaacgaagagaagcagaaaatgtatatggtgatggagtactgcgtgtgtggcatgcaggaaatgctggacagcgtgccggagaagcgtttcccagtgtgccaggcccacgggtacttctgtcagctgattgacggcctggagtacctgcatagccagggcattgtgcacaaggacatcaagccggggaacctgctgctcaccaccggtggcaccctcaaaatctccgacctgggcgtggccgaggcactgcacccgttcgcggcggacgacacctgccggaccagccagggctccccggctttccagccgcccgagattgccaacggcctggacaccttctccggcttcaaggtggacatctggtcggctggggtcaccctctacaacatcaccacgggtctgtaccccttcgaaggggacaacatctacaagttgtttgagaacatcgggaaggggagctacgccatcccgggcgactgtggccccccgctctctgacctgctgaaagggatgcttgagtacgaaccggccaagaggttctccatccggcagatccggcagcacagctggttccggaagaaacatcctccggctgaagcaccagtgcccatcccaccgagcccagacaccaaggaccggtggcgcagcatgactgtggtgccgtacttggaggacctgcacggcgcggacgaggacgaggacctcttcgacatcgaggatgacatcatctacactcaggacttcacggtgcccggacaggtcccagaagaggaggccagtcacaatggacagcgccggggcctccccaaggccgtgtgtatgaacggcacagaggcggcgcagctgagcaccaaatccagggcggagggccgggcccccaaccctgcccgcaaggcctgctccgccagcagcaagatccgccggctgtcggcctgcaagcagcagtgaggctggccgcctgcagcccgtgtccaggagccccgccaggtgcccgcgccaggccctcagtcttcctgccggttccgcccgccctcccggagaggtggccgccatgcttctgtgccgaccacgccccaggacctccggagcgccctgcagggccgggcagggggacagcagggaccgggcgcagccctcccccctcggccgcccggcagtgcacgcggcttgttgacttcgcagccccgggcggagccttcccgggcgggcgtgggaggagggaggcggcctccatgcactttatgtggagactactggccccgcccgtggcctcgtgctccgcagggcgcccagcgccgtccggcggccccgccgcagaccagctggcgggtgtggagaccaggctcctgaccccgccatgcatgcagcgccacctggaagccgcgcggccgctttggttttttgtttggttggttccattttctttttttctttttttttttaagaaaaaataaaaggtggatttgagctgtggctgtgaggggtgtttgggagctgctgggtggcaggggggctgtggggtcgggctcacgtcgcggccgcctttgcgctctcgggtcaccctgctttggcggcccggccggagggcaggaccctcacctctcccccaaggccactgcgctcttgggaccccagagaaaacccggagcaagcaggagtgtgcggtcaatatttatatcatccagaaaagaaaaacacgagaaacgccatcgcgggatggtgcagacgcggcggggactcggagggtgccgtgcgggcgaggccgcccaaatttggcaataaataaagcttgggaagcttggacctgaaaaaaaaaa

SEQ ID NO: 30 - DNA, 4600 bp, Homo sapiens
gtcatgccgcccaaaaccccccgaaaaacggccgccaccgccgccgctgccgccgcggaacccccggcaccgccgccgccgccccctcctgaggaggacccagagcaggacagcggcccggaggacctgcctctcgtcaggcttgagtttgaagaaacagaagaacctgattttactgcattatgtcagaaattaaagataccagatcatgtcagagagagagcttggttaacttgggagaaagtttcatctgtggatggagtattgggaggttatattcaaaagaaaaaggaactgtggggaatctgtatctttattgcagcagttgacctagatgagatgtcgttcacttttactgagctacagaaaaacatagaaatcagtgtccataaattctttaacttactaaaagaaattgataccagtaccaaagttgataatgctatgtcaagactgttgaagaagtatgatgtattgtttgcactcttcagcaaattggaaaggacatgtgaacttatatatttgacacaacccagcagttcgatatctactgaaataaattctgcattggtgctaaaagtttcttggatcacatttttattagctaaaggggaagtattacaaatggaagatgatctggtgatttcatttcagttaatgctatgtgtccttgactattttattaaactctcacctcccatgttgctcaaagaaccatataaaacagctgttatacccattaatggttcacctcgaacacccaggcgaggtcagaacaggagtgcacggatagcaaaacaactagaaaatgatacaagaattattgaagttctctgtaaagaacatgaatgtaatatagatgaggtgaaaaatgtttatttcaaaaattttataccttttatgaattctcttggacttgtaacatctaatggacttccagaggttgaaaatctttctaaacgatacgaagaaatttatcttaaaaataaagatctagatgcaagattatttttggatcatgataaaactcttcagactgattctatagacagttttgaaacacagagaacaccacgaaaaagtaaccttgatgaagaggtgaatgtaattcctccacacactccagttaggactgttatgaacactatccaacaattaatgatgattttaaattcagcaagtgatcaaccttcagaaaatctgatttcctattttaacaactgcacagtgaatccaaaagaaagtatactgaaaagagtgaaggatataggatacatctttaaagagaaatttgctaaagctgtgggacagggttgtgtcgaaattggatcacagcgatacaaacttggagttcgcttgtattaccgagtaatggaatccatgcttaaatcagaagaagaacgattatccattcaaaattttagcaaacttctgaatgacaacatttttcatatgtctttattggcgtgcgctcttgaggttgtaatggccacatatagcagaagtacatctcagaatcttgattctggaacagatttgtctttcccatggattctgaatgtgcttaatttaaaagcctttgatttttacaaagtgatcgaaagttttatcaaagcagaaggcaacttgacaagagaaatgataaaacatttagaacgatgtgaacatcgaatcatggaatcccttgcatggctctcagattcacctttatttgatcttattaaacaatcaaaggaccgagaaggaccaactgatcaccttgaatctgcttgtcctcttaatcttcctctccagaataatcacactgcagcagatatgtatctttctcctgtaagatctccaaagaaaaaaggttcaactacgcgtgtaaattctactgcaaatgcagagacacaagcaacctcagccttccagacccagaagccattgaaatctacctctctttcactgttttataaaaaagtgtatcggctagcctatctccggctaaatacactttgtgaacgccttctgtctgagcacccagaattagaacatatcatctggacccttttccagcacaccctgcagaatgagtatgaactcatgagagacaggcatttggaccaaattatgatgtgttccatgtatggcatatgcaaagtgaagaatatagaccttaaattcaaaatcattgtaacagcatacaaggatcttcctcatgctgttcaggagacattcaaacgtgttttgatcaaagaagaggagtatgattctattatagtattctataactcggtcttcatgcagagactgaaaacaaatattttgcagtatgcttccaccaggccccctaccttgtcaccaatacctcacattcctcgaagcccttacaagtttcctagttcacccttacggattcctggagggaacatctatatttcacccctgaagagtccatataaaatttcagaaggtctgccaacaccaacaaaaatgactccaagatcaagaatcttagtatcaattggtgaatcattcgggacttctgagaagttccagaaaataaatcagatggtatgtaacagcgaccgtgtgctcaaaagaagtgctgaaggaagcaaccctcctaaaccactgaaaaaactacgctttgatattgaaggatcagatgaagcagatggaagtaaacatctcccaggagagtccaaatttcagcagaaactggcagaaatgacttctactcgaacacgaatgcaaaagcagaaaatgaatgatagcatggatacctcaaacaaggaagagaaatgaggatctcaggaccttggtggacactgtgtacacctctggattcattgtctctcacagatgtgactgtataactttcccaggttctgtttatggccacatttaatatcttcagctctttttgtggatataaaatgtgcagatgcaattgtttgggtgattcctaagccacttgaaatgttagtcattgttatttatacaagattgaaaatcttgtgtaaatcctgccatttaaaaagttgtagcagattgtttcctcttccaaagtaaaattgctgtgctttatggatagtaagaatggccctagagtgggagtcctgataacccaggcctgtctgactactttgccttcttttgtagcatataggtgatgtttgctcttgtttttattaatttatatgtatatttttttaatttaacatgaacacccttagaaaatgtgtcctatctatcttccaaatgcaatttgattgactgcccattcaccaaaattatcctgaactcttctgcaaaaatggatattattagaaattagaaaaaaattactaattttacacattagattttattttactattggaatctgatatactgtgtgcttgttttataaaattttgcttttaattaaataaaagctggaagcaaagtataaccatatgatactatcatactactgaaacagatttcatacctcagaatgtaaaagaacttactgattattttcttcatccaacttatgtttttaaatgaggattattgatagtactcttggtttttataccattcagatcactgaatttataaagtacccatctagtacttgaaaaagtaaagtgttctgccagatcttaggtatagaggaccctaacacagtatatcccaagtgcactttctaatgtttctgggtcctgaagaattaagatacaaattaattttactccataaacagactgttaattataggagccttaatttttttttcatagagatttgtctaattgcatctcaaaattattctgccctccttaatttgggaaggtttgtgttttctctggaatggtacatgtcttccatgtatcttttgaactggcaattgtctatttatcttttatttttttaagtcagtatggtctaacactggcatgttcaaagccacattatttctagtccaaaattacaagtaatcaagggtcattatgggttaggcattaatgtttctatctgattttgtgcaaaagcttcaaattaaaacagctgcattagaaaaagaggcgcttctcccctcccctacacctaaaggtgtatttaaactatcttgtgtgattaacttatttagagatgctgtaacttaaaataggggatatttaaggtagcttcagctagcttttaggaaaatcactttgtctaactcagaattatttttaaaaagaaatctggtcttgttagaaaacaaaattttattttgtgctcatttaagtttcaaacttactattttgacagttattttgataacaatgacactagaaaacttgactccatttcatcattgtttctgcatgaatatcatacaaatcagttagtttttaggtcaagggcttactatttctgggtcttttgctactaagttcacattagaattagtgccagaattttaggaacttcagagatcgtgtattgagatttcttaaataatgcttcagatattattgctttattgcttttttgtattggttaaaactgtacatttaaaattgctatgttactattttctacaattaatagtttgtctattttaaaataaattagttgttag

SEQ ID NO: 31 - DNA, 152 bp, Homo sapiens
gcttgcggaagtcagttcagactccagcccgctccagcccggcccgacccgaccgcacccggcgcctgccctcgctcggcgtccccggccagccatgggcccttggagccgcagcctctcggcgctgctgctgctgctgcaggtacctcgga

SEQ ID NO: 32 - DNA, 2520 bp, Homo sapiens
cgcgcgctgcctgaggacgccgcggcccccgcccccgccatgggcgcccctgcctgcgccctcgcgctctgcgtggccgtggccatcgtggccggcgcctcctcggagtccttggggacggagcagcgcgtcgtggggcgagcggcagaagtcccgggcccagagcccggccagcaggagcagttggtcttcggcagcggggatgctgtggagctgagctgtcccccgcccgggggtggtcccatggggcccactgtctgggtcaaggatggcacagggctggtgccctcggagcgtgtcctggtggggccccagcggctgcaggtgctgaatgcctcccacgaggactccggggcctacagctgccggcagcggctcacgcagcgcgtactgtgccacttcagtgtgcgggtgacagacgctccatcctcgggagatgacgaagacggggaggacgaggctgaggacacaggtgtggacacaggggccccttactggacacggcccgagcggatggacaagaagctgctggccgtgccggccgccaacaccgtccgcttccgctgcccagccgctggcaaccccactccctccatctcctggctgaagaacggcagggagttccgcggcgagcaccgcattggaggcatcaagctgcggcatcagcagtggagcctggtcatggaaagcgtggtgccctcggaccgcggcaactacacctgcgtcgtggagaacaagtttggcagcatccggcagacgtacacgctggacgtgctggagcgctccccgcaccggcccatcctgcaggcggggctgccggccaaccagacggcggtgctgggcagcgacgtggagttccactgcaaggtgtacagtgacgcacagccccacatccagtggctcaagcacgtggaggtgaacggcagcaaggtgggcccggacggcacaccctacgttaccgtgctcaagacggcgggcgctaacaccaccgacaaggagctagaggttctctccttgcacaacgtcacctttgaggacgccggggagtacacctgcctggcgggcaattctattgggttttctcatcactctgcgtggctggtggtgctgccagccgaggaggagctggtggaggctgacgaggcgggcagtgtgtatgcaggcatcctcagctacggggtgggcttcttcctgttcatcctggtggtggcggctgtgacgctctgccgcctgcgcagcccccccaagaaaggcctgggctcccccaccgtgcacaagatctcccgcttcccgctcaagcgacaggtgtccctggagtccaacgcgtccatgagctccaacacaccactggtgcgcatcgcaaggctgtcctcaggggagggccccacgctggccaatgtctccgagctcgagctgcctgccgaccccaaatgggagctgtctcgggcccggctgaccctgggcaagccccttggggagggctgcttcggccaggtggtcatggcggaggccatcggcattgacaaggaccgggccgccaagcctgtcaccgtagccgtgaagatgctgaaagacgatgccactgacaaggacctgtcggacctggtgtctgagatggagatgatgaagatgatcgggaaacacaaaaacatcatcaacctgctgggcgcctgcacgcagggcgggcccctgtacgtgctggtggagtacgcggccaagggtaacctgcgggagtttctgcgggcgcggcggcccccgggcctggactactccttcgacacctgcaagccgcccgaggagcagctcaccttcaaggacctggtgtcctgtgcctaccaggtggcccggggcatggagtacttggcctcccagaagtgcatccacagggacctggctgcccgcaatgtgctggtgaccgaggacaacgtgatgaagatcgcagacttcgggctggcccgggacgtgcacaacctcgactactacaagaagacaaccaacggccggctgcccgtgaagtggatggcgcctgaggccttgtttgaccgagtctacactcaccagagtgacgtctggtcctttggggtcctgctctgggagatcttcacgctggggggctccccgtaccccggcatccctgtggaggagctcttcaagctgctgaaggagggccaccgcatggacaagcccgccaactgcacacacgacctgtacatgatcatgcgggagtgctggcatgccgcgccctcccagaggcccaccttcaagcagctggtggaggacctggaccgtgtccttaccgtgacgtccaccgacgagtacctggacctgtcggcgcctttcgagcagtactccccgggtggccaggacacccccagctccagctcctcaggggacgactccgtgtttgcccacgacctgctgcccccggccccacccagcagtgggggctcgcggacgtgaagggccactggtccccaacaatgtgaggggtccctagcagccctccctgctgctggtgca

SEQ ID NO: 33 - DNA, 6055 bp, Homo sapiens
actgagtcccgggaccccgggagagcggtcaatgtgtggtcgctgcgtttcctctgcctgcgccgggcatcacttgcgcgccgcagaaagtccgtctggcagcctggatatcctctcctaccggcacccgcagacgcccctgcagccgcggtcggcgcccgggctccctagccctgtgcgctcaactgtcctgcgctgcggggtgccgcgagttccacctccgcgcctccttctctagacaggcgctgggagaaagaaccggctcccgagttctgggcatttcgcccggctcgaggtgcaggatgcagagcaaggtgctgctggccgtcgccctgtggctctgcgtggagacccgggccgcctctgtgggtttgcctagtgtttctcttgatctgcccaggctcagcatacaaaaagacatacttacaattaaggctaatacaactcttcaaattacttgcaggggacagagggacttggactggctttggcccaataatcagagtggcagtgagcaaagggtggaggtgactgagtgcagcgatggcctcttctgtaagacactcacaattccaaaagtgatcggaaatgacactggagcctacaagtgcttctaccgggaaactgacttggcctcggtcatttatgtctatgttcaagattacagatctccatttattgcttctgttagtgaccaacatggagtcgtgtacattactgagaacaaaaacaaaactgtggtgattccatgtctcgggtccatttcaaatctcaacgtgtcactttgtgcaagatacccagaaaagagatttgttcctgatggtaacagaatttcctgggacagcaagaagggctttactattcccagctacatgatcagctatgctggcatggtcttctgtgaagcaaaaattaatgatgaaagttaccagtctattatgtacatagttgtcgttgtagggtataggatttatgatgtggttctgagtccgtctcatggaattgaactatctgttggagaaaagcttgtcttaaattgtacagcaagaactgaactaaatgtggggattgacttcaactgggaatacccttcttcgaagcatcagcataagaaacttgtaaaccgagacctaaaaacccagtctgggagtgagatgaagaaatttttgagcaccttaactatagatggtgtaacccggagtgaccaaggattgtacacctgtgcagcatccagtgggctgatgaccaagaagaacagcacatttgtcagggtccatgaaaaaccttttgttgcttttggaagtggcatggaatctctggtggaagccacggtgggggagcgtgtcagaatccctgcgaagtaccttggttacccacccccagaaataaaatggtataaaaatggaataccccttgagtccaatcacacaattaaagcggggcatgtactgacgattatggaagtgagtgaaagagacacaggaaattacactgtcatccttaccaatcccatttcaaaggagaagcagagccatgtggtctctctggttgtgtatgtcccaccccagattggtgagaaatctctaatctctcctgtggattcctaccagtacggcaccactcaaacgctgacatgtacggtctatgccattcctcccccgcatcacatccactggtattggcagttggaggaagagtgcgccaacgagcccagccaagctgtctcagtgacaaacccatacccttgtgaagaatggagaagtgtggaggacttccagggaggaaataaaattgaagttaataaaaatcaatttgctctaattgaaggaaaaaacaaaactgtaagtacccttgttatccaagcggcaaatgtgtcagctttgtacaaatgtgaagcggtcaacaaagtcgggagaggagagagggtgatctccttccacgtgaccaggggtcctgaaattactttgcaacctgacatgcagcccactgagcaggagagcgtgtctttgtggtgcactgcagacagatctacgtttgagaacctcacatggtacaagcttggcccacagcctctgccaatccatgtgggagagttgcccacacctgtttgcaagaacttggatactctttggaaattgaatgccaccatgttctctaatagcacaaatgacattttgatcatggagcttaagaatgcatccttgcaggaccaaggagactatgtctgccttgctcaagacaggaagaccaagaaaagacattgcgtggtcaggcagctcacagtcctagagcgtgtggcacccacgatcacaggaaacctggagaatcagacgacaagtattggggaaagcatcgaagtctcatgcacggcatctgggaatccccctccacagatcatgtggtttaaagataatgagacccttgtagaagactcaggcattgtattgaaggatgggaaccggaacctcactatccgcagagtgaggaaggaggacgaaggcctctacacctgccaggcatgcagtgttcttggctgtgcaaaagtggaggcatttttcataatagaaggtgcccaggaaaagacgaacttggaaatcattattctagtaggcacggcggtgattgccatgttcttctggctacttcttgtcatcatcctacggaccgttaagcgggccaatggaggggaactgaagacaggctacttgtccatcgtcatggatccagatgaactcccattggatgaacattgtgaacgactgccttatgatgccagcaaatgggaattccccagagaccggctgaagctaggtaagcctcttggccgtggtgcctttggccaagtgattgaagcagatgcctttggaattgacaagacagcaacttgcaggacagtagcagtcaaaatgttgaaagaaggagcaacacacagtgagcatcgagctctcatgtctgaactcaagatcctcattcatattggtcaccatctcaatgtggtcaaccttctaggtgcctgtaccaagccaggagggccactcatggtgattgtggaattctgcaaatttggaaacctgtccacttacctgaggagcaagagaaatgaatttgtcccctacaagaccaaaggggcacgattccgtcaagggaaagactacgttggagcaatccctgtggatctgaaacggcgcttggacagcatcaccagtagccagagctcagccagctctggatttgtggaggagaagtccctcagtgatgtagaagaagaggaagctcctgaagatctgtataaggacttcctgaccttggagcatctcatctgttacagcttccaagtggctaagggcatggagttcttggcatcgcgaaagtgtatccacagggacctggcggcacgaaatatcctcttatcggagaagaacgtggttaaaatctgtgactttggcttggcccgggatatttataaagatccagattatgtcagaaaaggagatgctcgcctccctttgaaatggatggccccagaaacaatttttgacagagtgtacacaatccagagtgacgtctggtcttttggtgttttgctgtgggaaatattttccttaggtgcttctccatatcctggggtaaagattgatgaagaattttgtaggcgattgaaagaaggaactagaatgagggcccctgattatactacaccagaaatgtaccagaccatgctggactgctggcacggggagcccagtcagagacccacgttttcagagttggtggaacatttgggaaatctcttgcaagctaatgctcagcaggatggcaaagactacattgttcttccgatatcagagactttgagcatggaagaggattctggactctctctgcctacctcacctgtttcctgtatggaggaggaggaagtatgtgaccccaaattccattatgacaacacagcaggaatcagtcagtatctgcagaacagtaagcgaaagagccggcctgtgagtgtaaaaacatttgaagatatcccgttagaagaaccagaagtaaaagtaatcccagatgacaaccagacggacagtggtatggttcttgcctcagaagagctgaaaactttggaagacagaaccaaattatctccatcttttggtggaatggtgcccagcaaaagcagggagtctgtggcatctgaaggctcaaaccagacaagcggctaccagtccggatatcactccgatgacacagacaccaccgtgtactccagtgaggaagcagaacttttaaagctgatagagattggagtgcaaaccggtagcacagcccagattctccagcctgactcggggaccacactgagctctcctcctgtttaaaaggaagcatccacacccccaactcctggacatcacatgagaggtgctgctcagattttcaagtgttgttctttccaccagcaggaagtagccgcatttgattttcatttcgacaacagaaaaaggacctcggactgcagggagccagtcttctaggcatatcctggaagaggcttgtgacccaagaatgtgtctgtgtcttctcccagtgttgacctgatcctctttttcattcatttaaaaagcatttatcatgccccctgctgcgggtctcaccatgggtttagaacaaagacgttcaagaaatggccccatcctcaaagaagtagcagtacctggggagctgacacttctgtaaaactagaagataaaccaggcaatgtaagtgttcgaggtgttgaagatgggaaggatttgcagggctgagtctatccaagaggctttgtttaggacgtgggtcccaagccaagccttaagtgtggaattcggattgatagaaaggaagactaacgttaccttgctttggagagtactggagcctgcaaatgcattgtgtttgctctggtggaggtgggcatggggtctgttctgaaatgtaaagggttcagacggggtttctggttttagaaggttgcgtgttcttcgagttgggctaaagtagagttcgttgtgctgtttctgactcctaatgagagttccttccagaccgttacgtgtctcctggccaagccccaggaaggaaatgatgcagctctggctccttgtctcccaggctgatcctttattcagaataccacaaagaaaggacattcagctcaaggctccctgccgtgttgaagagttctgactgcacaaaccagcttctggtttcttctggaatgaataccctcatatctgtcctgatgtgatatgtctgagactgaatgcgggaggttcaatgtgaagctgtgtgtggtgtcaaagtttcaggaaggattttacccttttgttcttccccctgtccccaacccactctcaccccgcaacccatcagtattttagttatttggcctctactccagtaaacctgattgggtttgttcactctctgaatgattattagccagacttcaaaattattttatagcccaaattataacatctattgtattatttagacttttaacatatagagctatttctactgatttttgcccttgttctgtcctttttttcaaaaaagaaaatgtgttttttgtttggtaccatagtgtgaaatgctgggaacaatgactataagacatgctatggcacatatatttatagtctgtttatgtagaaacaaatgtaatatattaaagccttatatataatgaactttgtactattcacattttgtatcagtattatgtagcataacaaaggtcataatgctttcagcaattgatgtcattttattaaagaacattgaaaaacttgaaggaatccctttgcaaggttgcattactgtacccatcatttctaaaatggaagagggggtggctgggcacagtggccgacacctaaaaacccagcactttggggggccaaggtgggaggatcgcttgagcccaggagttcaagaccagtctggccaacatggtcagattccatctcaaagaaaaaaggtaaaaataaaataaaatggagaagaaggaatcaga

SEQ ID NO: 34 - DNA, 3724 bp, Homo sapiens
tctccctcggcgccgccgccgccgcccgcggggctgggacccgatgcggttagagccgcggagcctggaagagccccgagcgtttctgctttgggacaaccatacatctaattccttaaagtagttttatatgtaaaacttgcaaagaatcagaacaatgcctccacgaccatcatcaggtgaactgtggggcatccacttgatgcccccaagaatcctagtagaatgtttactaccaaatggaatgatagtgactttagaatgcctccgtgaggctacattaataaccataaagcatgaactatttaaagaagcaagaaaataccccctccatcaacttcttcaagatgaatcttcttacattttcgtaagtgttactcaagaagcagaaagggaagaattttttgatgaaacaagacgactttgtgaccttcggctttttcaaccctttttaaaagtaattgaaccagtaggcaaccgtgaagaaaagatcctcaatcgagaaattggttttgctatcggcatgccagtgtgtgaatttgatatggttaaagatccagaagtacaggacttccgaagaaatattctgaacgtttgtaaagaagctgtggatcttagggacctcaattcacctcatagtagagcaatgtatgtctatcctccaaatgtagaatcttcaccagaattgccaaagcacatatataataaattagataaagggcaaataatagtggtgatctgggtaatagtttctccaaataatgacaagcagaagtatactctgaaaatcaaccatgactgtgtaccagaacaagtaattgctgaagcaatcaggaaaaaaactcgaagtatgttgctatcctctgaacaactaaaactctgtgttttagaatatcagggcaagtatattttaaaagtgtgtggatgtgatgaatacttcctagaaaaatatcctctgagtcagtataagtatataagaagctgtataatgcttgggaggatgcccaatttgatgttgatggctaaagaaagcctttattctcaactgccaatggactgttttacaatgccatcttattccagacgcatttccacagctacaccatatatgaatggagaaacatctacaaaatccctttgggttataaatagtgcactcagaataaaaattctttgtgcaacctacgtgaatgtaaatattcgagacattgataagatctatgttcgaacaggtatctaccatggaggagaacccttatgtgacaatgtgaacactcaaagagtaccttgttccaatcccaggtggaatgaatggctgaattatgatatatacattcctgatcttcctcgtgctgctcgactttgcctttccatttgctctgttaaaggccgaaagggtgctaaagaggaacactgtccattggcatggggaaatataaacttgtttgattacacagacactctagtatctggaaaaatggctttgaatctttggccagtacctcatggattagaagatttgctgaaccctattggtgttactggatcaaatccaaataaagaaactccatgcttagagttggagtttgactggttcagcagtgtggtaaagttcccagatatgtcagtgattgaagagcatgccaattggtctgtatcccgagaagcaggatttagctattcccacgcaggactgagtaacagactagctagagacaatgaattaagggaaaatgacaaagaacagctcaaagcaatttctacacgagatcctctctctgaaatcactgagcaggagaaagattttctatggagtcacagacactattgtgtaactatccccgaaattctacccaaattgcttctgtctgttaaatggaattctagagatgaagtagcccagatgtattgcttggtaaaagattggcctccaatcaaacctgaacaggctatggaacttctggactgtaattacccagatcctatggttcgaggttttgctgttcggtgcttggaaaaatatttaacagatgacaaactttctcagtatttaattcagctagtacaggtcctaaaatatgaacaatatttggataacttgcttgtgagatttttactgaagaaagcattgactaatcaaaggattgggcactttttcttttggcatttaaaatctgagatgcacaataaaacagttagccagaggtttggcctgcttttggagtcctattgtcgtgcatgtgggatgtatttgaagcacctgaataggcaagtcgaggcaatggaaaagctcattaacttaactgacattctcaaacaggagaagaaggatgaaacacaaaaggtacagatgaagtttttagttgagcaaatgaggcgaccagatttcatggatgctctacagggctttctgtctcctctaaaccctgctcatcaactaggaaacctcaggcttgaagagtgtcgaattatgtcctctgcaaaaaggccactgtggttgaattgggagaacccagacatcatgtcagagttactgtttcagaacaatgagatcatctttaaaaatggggatgatttacggcaagatatgctaacacttcaaattattcgtattatggaaaatatctggcaaaatcaaggtcttgatcttcgaatgttaccttatggttgtctgtcaatcggtgactgtgtgggacttattgaggtggtgcgaaattctcacactattatgcaaattcagtgcaaaggcggcttgaaaggtgcactgcagttcaacagccacacactacatcagtggctcaaagacaagaacaaaggagaaatatatgatgcagccattgacctgtttacacgttcatgtgctggatactgtgtagctaccttcattttgggaattggagatcgtcacaatagtaacatcatggtgaaagacgatggacaactgtttcatatagattttggacactttttggatcacaagaagaaaaaatttggttataaacgagaacgtgtgccatttgttttgacacaggatttcttaatagtgattagtaaaggagcccaagaatgcacaaagacaagagaatttgagaggtttcaggagatgtgttacaaggcttatctagctattcgacagcatgccaatctcttcataaatcttttctcaatgatgcttggctctggaatgccagaactacaatcttttgatgacattgcatacattcgaaagaccctagccttagataaaactgagcaagaggctttggagtatttcatgaaacaaatgaatgatgcacatcatggtggctggacaacaaaaatggattggatcttccacacaattaaacagcatgcattgaactgaaaagataactgagaaaatgaaagctcactctggattccacactgcactgttaataactctcagcaggcaaagaccgattgcataggaattgcacaatccatgaacagcattagaatttacagcaagaacagaaataaaatactatataatttaaataatgtaaacgcaaacagggtttgatagcacttaaactagttcatttcaaaattaagctttagaataatgcgcaatttcatgttatgccttaagtccaaaaaggtaaactttgaagattgtttgtatctttttttaaaaaacaaaacaaaacaaaaatccccaaaatatatagaaatgatggagaaggaaaaaaaaaaaaaaaaa

SEQ ID NO: 35 - DNA, 20303 bp, Homo sapiens
ttcccatcaagccctagggctcctcgtggctgctgggagttgtagtctgaacgcttctatcttggcgagaagcgcctacgctccccctaccgagtcccgcggtaattcttaaagcacctgcaccgcccccccgccgcctgcagagggcgcagcaggtcttgcacctcttctgcatctcattctccaggcttcagacctgtctccctcattcaaaaaatatttattatcgagctcttacttgctacccagcactgatataggcactcaggaatacaacaatgaataagatagtagaaaaattctatatcctcataaggcttacgtttccatgtactgaaagcaatgaacaaataaatcttatcagagtgataagggttgtgaaggagattaaataagatggtgtgatataaagtatctgggagaaaacgttagggtgtgatattacggaaagccttcctaaaaaatgacattttaactgatgagaagaaaggatccagctgagagcaaacgcaaaagctttcttccttccacccttcatatttgacacaatgcaggattcctccaaaatgatttccaccaattctgccctcacagctctggcttgcagaattttccaccccaaaatgttagtatctacggcaccaggtcggcgagaatcctgactctgcaccctcctccccaactccatttcctttgcttcctccggcaggcggattacttgcccttacttgtcatggcgactgtccagctttgtgccaggagcctcgcaggggttgatgggattggggttttcccctcccatgtgctcaagactggcgctaaaagttttgagcttctcaaaagtctagagccaccgtccagggagcaggtagctgctgggctccggggacactttgcgttcgggctgggagcgtgctttccacgacggtgacacgcttccctggattgggtaagctcctgactgaacttgatgagtcctctctgagtcacgggctctcggctccgtgtattttcagctcgggaaaatcgctggggctgggggtggggcagtggggacttagcgagtttgggggtgagtgggatggaagcttggctagagggatcatcataggagttgcattgttgggagacctgggtgtagatgatggggatgttaggaccatccgaactcaaagttgaacgcctaggcagaggagtggagctttggggaaccttgagccggcctaaagcgtacttctttgcacatccacccggtgctgggcgtagggaatccctgaaataaaagatgcacaaagcattgaggtctgagacttttggatctcgaaacattgagaactcatagctgtatattttagagcccatggcatcctagtgaaaactggggctccattccgaaatgatcatttgggggtgatccggggagcccaagctgctaaggtcccacaacttccggacctttgtccttcctggagcgatctttccaggcagcccccggctccgctagatggagaaaatccaattgaaggctgtcagtcgtggaagtgagaagtgctaaaccaggggtttgcccgccaggccgaggaggaccgtcgcaatctgagaggcccggcagccctgttattgtttggctccacatttacatttctgcctcttgcagcagcatttccggtttctttttgccggagcagctcactattcacccgatgagaggggaggagagagagagaaaatgtcctttaggccggttcctcttacttggcagagggaggctgctattctccgcctgcatttctttttctggattacttagttatggcctttgcaaaggcaggggtatttgttttgatgcaaacctcaatccctccccttctttgaatggtgtgccccaccccccgggtcgcctgcaacctaggcggacgctaccatggcgtagacagggagggaaagaagtgtgcagaaggcaagcccggaggcactttcaagaatgagcatatctcatcttcccggagaaaaaaaaaaaagaatggtacgtctgagaatgaaattttgaaagagtgcaatgatgggtcgtttgataatttgtcgggaaaaacaatctacctgttatctagctttgggctaggccattccagttccagacgcaggctgaacgtcgtgaagcggaaggggcgggcccgcaggcgtccgtgtggtcctccgtgcagccctcggcccgagccggttcttcctggtaggaggcggaactcgaattcatttctcccgctgccccatctcttagctcgcggttgtttcattccgcagtttcttcccatgcacctgccgcgtaccggccactttgtgccgtacttacgtcatctttttcctaaatcgaggtggcatttacacacagcgccagtgcacacagcaagtgcacaggaagatgagttttggcccctaaccgctccgtgatgcctaccaagtcacagacccttttcatcgtcccagaaacgtttcatcacgtctcttcccagtcgattcccgaccccacctttattttgatctccataaccattttgcctgttggagaacttcatatagaatggaatcaggatgggcgctgtggctcacgcctgcactttggctcacgcctgcactttgggaggccgaggcgggcggattacttgaggataggagttccagaccagcgtggccaacgtggtgaatccccgtctctactaaaaaatacaaaaattagctgggcgtggtgggtgcctgtaatcccagctattcgggagggtgaggcaggagaatcgcttgaacccgggaggcagaggttgcagtgagccaagatcgtgccactacactccagcctgggcgacaagaacgaaactccgtctcaaaaaaaaggggggaatcatacattatgtgctcatttttgtcgggcttctgtccttcaatgtactgtctgacattcgttcatgttgtatatatcagtattttgctccttttcatttagtatagtccatcgattgtatatccgtccttttgatggccttttgagttgtttcccatttgcggttatgaaataaagctgctataaacattcttgtacaattctttttgtgatcatatgttttcgtgtttcttggagaaatacttaggaggggaattgtggaggaagtaaaaagtagctgtattttgaactttttcagaagctctgagttttccagagcggttgtaccattttacactccaactagcaaggtatgggagttattatggttgtgccacagccttccggacattaggtatgtcagtctttctaatgtggtatatccttgtggttgtaatttacagttctctattgactaaggatgttcagcattttttcatgtgcctattggccattcgtattttgtttgtaaagtagctcttcgagtcttttacctgttattttggtttttttgtttgtttttattgttcagttgtgggactgctttatactttctggatacaagtccttatcagatccatgagtcgtgaatgttttcttctgatctgttgcgggcctatttgtttgctttacagagtttacagaatcttaagaggagtggattaatcttttttatgttcagtatttgccttgtcctgtttaggacatctttttttttttttttaaccccagggtcatgaagatataatcttacattttcttttaggacctttatggtggtaagttttacagtaaggtccttaagccattaattaattcttaaaattaattgtttatggtgtgaggtgtaggagtcagtctctggtatctttcctgtatggaaatccagttattctgtctccacttgttgaaataggcttcctttctctactgaatgcttttaattttaattattttacagttggagtatagggctaccattttagtgctattttctttttttctttgttaatttttgagacagggactcacactgttgcccaggctagagtacaatggcacaatcaaggcttactgcagcctcgaacccctgggctcaagcagtcctctagcagcctcacgagtagctgggattactccaccacacccagctaactattttatttttttgtattgacaggatctcactatgttgcccaggctggtctcaaactgctggcctcaagctttcatcccatctcggcctcccaaagtgctgggattacaggtgtgagccaccatgcctgacctcttagtgctattttctatttatctcctctgttctctgctctctttaaacgttggaggaagaaacagtacccatcttacacaaactcttcagaaaacagaggaacagactgggcgcggtggctcatacctgtaatctcagcactttggtacgctgaggcaggggatcatttgaggtcgggagttcgagaccagcctggccaacacggcgaaaccccatctctactaaaatacaaaagtagctaggcgtgcaccatacctgtaatgccagttactcaggaggctgaggcacaagaatcccttgaacctgggaagcggaggttgcagtgagccgagattgcgccactgcactccagcctgggcaacagagtgagaccctgtctcagaaaaaaaaagaaagaaagaaaaaatagaggaatatttcccaacttgttttcgaagccaggataatcctggtaccaaaaccaaacaaggacattataagaaaagaaaatatagaccaatattcctgttagcatagacatgcaacagctaaccaattttagcaaaccaaacctggtaatatagaaaaaaggataaataggccagtcgcggtggctcacgcctgtaatcccagcactttgggaggctgaggcaggcagatcacttgaggtcaggagtttgagaccagcctgaccaacatggtgaaaccccgtttctaataaaaatacaaaaatcaggctgggcacggtggctcacgcctgtaatcccagcactttgggaggccgaggtgggcagatcacgaggtcaggagttcaagaccagcctgaccaatgtggtgaaacgccatctctactaaaaatacgaaaatcagccggtgtggtggcacctgcctgtaatcccagctactcaggaggctgaggcagaattgcttgaacccgggaggcagaggttgcagtgagccaagatcgtgccactgcactccagcctgggcgacagagcaagacttcatctcaaaaaaaaaaaaaattagctgggcatggtggtgggcacctgaaatcccagctactcgggagtctgaggcaggagaatcgcttgaacccaggaggcagaagttgcactgagctgggatcacaccattgcactccagcctgggcaacagagtgagactccatctcaaaaaaagaaaaagaaaaaggataaatacattctaaccaaataatgtttatctcatgattgtagctgattcaacattcaaaaattggcctggtgcagtagctcaggcctgtaatcccaacattttaggaggctgaggcaggaagatctcttgagcccaggatttcaagaccagcctgggcaacatagtcagactggtctttactggggggaaaaaaatcagtctgtgtaattcaccacattaacaaagggaaacataaaaaccctatgatcatttcaacagatgtagcaaaagcagttaatgatatcaacacatatgcatgattacaaaccaaccaacctcctagcaaactagggaaaggaaacttaactagtttgataacagggcgtccacagtcggagttccactagcagcatacataatggtagaaaactcagtgctgctgggggcggtggctcacgcctgtaatgccagcgctttgggaggcctaggcgggcggatcacgaggtcaggagatcgagactgtcctgactagcatgctgaaaccccgtctctactaaaaatacaaaaacaaaaaattagccgggcatggtggcgggcgcctatagtgccagctactcgggaggctgaggcgagagaatggcgtgaacccgggaggcggagcttgcagagcctagatcgtgccactgcactccagcctgggtgacagagtgagacttcgtctcaaaaaaaaaaaaaaaaaaaaaagaaaagaaaactcaacgctttttcctctaagatcaggaactagaaaaggatttgactctcacaacgttgataccatactggaggttttaaccaggcaagaaaaagaaataatgagggccgggtgcggtggctcaggcctgtaatcccagcactttgggaagccgagacgggtggatcacgaggtcaggagatcgagccatcctggctaacacggtgaaaccctgtctctactaaatatacaaaaaattagccgggcgtggtggcgggcgcctgtagtcccagctactcgggaggctgaggcaggagaatggcgtgaactcagggggcggagcttgcagtgagctgagatcgagccactgcactccagcctgggcgacagagcaagactgtgtctcaaaaaaaaaaaaagaaaaagaaataatgattagtggcccgatgtctcacgccagtaatcccagcactttgggaggccgaggtgggcagatcacctgaggtctggagttggagaccagcctgacaaagatggtgaaacctcgtctctattaaaatattaaaaaaatagccaggcgttggccgggtacagtggctcatgcctgtaaccccagcactttgggaggccgaggtgggtggatcacctgaggtcaggagttcaacaccagcctggccaacatggtgaaaccccatctctactaaaaatacaaaattagccgggcgtagtggcgggcgcctgtaatcccagctacttgggaggcttaggcaggagaatcgcttgaacctgggaggcggaggttgtagtgagccgagattgcaccattgcactccagcctgggtgacaaaagcaaaaactccgtctcaaaaaaaaaagaattagccaggggtagtggtgaacgcctgtagtcccagctactcaggaggcagaggcaggagaatcacttgaaccccggaggcagaggttgcagtgagccgagattgtcccattgcactccagcctaggcgagaagagcaaaattccatgtcaaaaaaaaaaaaaaaaaaggaaagaaaaaaaataacgattagaaaggaagaaatcaaacacattcacagccagtatgattctatacataccatggtcctaatggggccaggcgtggtggctcatgctgtaatcctagcacttttaggaggctgaggcaggtggcttccctgggaccagctggccaacatggtgaaaccccaactctaataaaaatacaaaaaatcagccaggcgtggtgagggcacctctaatcccagctactcaggaggctgaggcaggagaattgcttggacctgggaggcagaggttgcagtgagccgagatcgcgctattgcactccagcctgggcaacaagagtgaaactccggcagggtgtggtcttacgcctgtaatcccagcacttcgggaggctgagccaggccgatcacctgaggtcaggagtttgagaccaacctaacatggtgaaaccccgtctctactaaaaatacaagaattagctgggtgtagtggtgggcgcctgtaatcccagctacttgggaggctgagacagaagaattgcttgaacccaggaggtggaggttgcagtgagctgagatcatgccattgcacaccacgccgggcaacagagcgagattccgtctcaaaaaaaaaaaaaagatgaaactctatctcaaaaaaaaaaaaaagtcctaatggaaaatccataaaaagctaccaaaactaataaataaatatagcagggttgcaggttacagggcaatatagttatccctctatctgtaggggcttggttctgggactcctcacacaccaaacccacagatgtctaagtcccatatataagacggaatagtatttaacctacacatatcctcccatatagtttaaattatctagattacttacattacccccatacaatgaaaatgctaatgtacatgcaagtatgtatgtaagtacttgtactatattgtttagggaatcactggacagataggccttcaagactgataccagcagccactgttaagattctggtcaggcctgcccctgtttggggtctcagttgatctcattgccttcccacccagccaagggcacctgcatttctcttggctccctggccatttggaaggcctagttcagcctggcacatttgtatcctggcccactgatgctggtacccctgggaaggtcctgctctgaaaaacacggagattttagttgctactgaagatttgagagataaagacagggagacctgtctgtagacctgtgtccctccaagtgggattgagactttgggccccccatttcaggacagcacctcctggcctgttgactgaatagatccctgaaggaggtgtagttgcattttaggagtgggggtgggagcagtaccactgatccgcactaacaatcacacagttctctctagaataataatatagaacaagtgaaatagaacaattgcagaaagagctaacctttgttgagctcttactgtgtgcccagcactttcctcaactctacatttcccataatacatagagtactaggtaggcggggcttgggggctcacgcctgtaatcccagcactttaggaggccaaggggggtggatcacctgaggtcgggagttcaagaccagcctgactaacatggtgaaaccccgtctctactagaagtacaaaattagccaggtgtggtggcacatgcttgtagtcctagctactcagcaggctgaggcaggagaatcatttgaatccgggaggaggttgcagtaagcggagatagtgccactgtactccagcctgggcaataagagctgagactccgtctcaaaataaaataaaataaaataaaataaaataaaataaaataaaaaaagaaaagagcctgccattaaaggagctgtttggtaggggatgttttgtcagtgcaaacaacagaaaagtgggctgggcacagtggttcatgcctgtaatcccagcactttgggaggccaaggcgggcggatcacctgaagttgggagttcaagaccagcctgaccaatatggagaaaccccgtctctactaaaaatacaaaattagccgggcgcagtggccgatgcctgtaatcccagctactcgggaggctgaggcaggagaatcgcttgaacctgggaggcagaggttgcggtgagccgagatcgcaccattgcactccagcctggacgagagcaaaactctgtctcaaaaaaaaaaaaaaacagaaaagtgtaacaaacacttacagtaggcatgtttcttagcaaatctgatgacaaatttggcataaagaaagagagcatccctgaaaaaaaaaaaaagaaaaagaaagagagcatcctgcctgggcaacatagtgaaaccctgcctctacaaaaaaactcaaaaattggccgggtgcagtggctcacacctgtaatcccagcactttgggagtcggaggcgggaggatcacctgaggtcaggagttcgaaaccagcctggccaacatggcaaaaccccatctctactaaaaatacaaaaaattaatcaggcgcattggtgggcgcctgtaatcccagctactcaggaagttgaggcaagaggatcgcttgatactgggaggtggaggttacagtgagtcgagatcacaccactgcactctagcctgggtgacagggcgagactccgtctccaaaaaaaaaaagaaaaagaaaaagactaaaaaattagccaggcaggcctctgtggtcccagctacttgggaggctgaggcaggagaatcactgagcccaggagtggcaggctgtagtgagccatgattgcaccactgtaccctagcttgggcttcaaagcaagaccctgcctcaaaagaaaaaagaaagaaagaaagaacatggcgggccaggcacagtggctcacacctgtaatcccagcgctttgagaggccgaggcaggtggatcacaaggtcaggagttccacaccagcctggccaacatggtgaaaccctgtctctactaaaaatacaaaaaatcagcaggcagggtggtaggggcctgtaatcccagctactcgggaggctgaggcaggagaattgcttgaaaccagaaggcagaggttgcagtgagcctagactgcaccactgcactccagcctgggcgaaaagagccaaactccatctcaaaaaacaaacaaaaaaacaaaacaaaaaaaaacatggcagcctttgaaagcttgtctgggagaaggtgcgatgatggttgcataacttcgtgcaagatgctggtccacacaggggctgccccttgctctttctcgctctcttaacctctcatataacaggcttgtgtgttatgcacatttattgagcccaagcaggtgcaaggcattgtgatctaatactttggtcagcaagacaacaagatagatcactgccctgcccttaggaagtgtatatgctattagaggaaacagataaaataaacaaggaaaagtatcagacaatgtaagtgctatgagaatgcaaatgaggtgatgtgaattaaaataggatgacttaagtctgcacggaaggcccctacccccatgttcctggctagccaaggaaccaccagttgattagcagagaagggcagcccgtctagctagagcttttggggaagagggagtggttgttaagagatgagattaaagaagccgagacgggcccttcgtgagggggggttgtaatgcagggctgaggagtgtccgaagagaatgggcaggtgagcggtgagacagttgttcttccagaagctttgcagtgaaaggaatcaaagaaatggagccgtgtatcaggtggggaagggtgggggccaagggggtgtccttccccatacagagattgcaggctgagaatgactatatccttgttaacaggaggtgggagcagggcacggtagctcacacctgtaatcttggcactttaggaggcggaggcgggccgatcacctgaagtaaggagttcgagaccagcctggccaacatgcaaagccctgtctctactaaaaatacaaaaattagctgggtgtggtggtactcgcctgtaatcccagctactcgggagactgaggcaggagaatggcttgaacccggaaggtagaggttgcagtgagctgagatcatgccactgtgctccagcctaggtgacagagagagactccatctcaaaaaaaaaaaaaaatacaggaagggagttgggaatagggtgcacatttaggaagtcttggggatttagtggtgggaaggttggaagtccctctctgattgtcttttcctcaaagaagtgcatggctggtgtggggtggggcaggagtgcttgggttgtggtgaaacattggaagagagaatgtgaagcagccattcttttcctgctccacaggaagccgagctgtctcagacactggcatggtgttgggggagggggttccttctctgcaggcccaggtgacccagggttggaagtgtctcatgctggatccccacttttcctcttgcagcagccagactgccttccgggtcactgccatggaggagccgcagtcagatcctagcgtcgagccccctctgagtcaggaaacattttcagacctatggaaactgtgagtggatccattggaagggcaggccaccaccccgaccccaaccccagccccctagcagagacctgtgggaagcgaaaattcatgggactgactttctgctcttgtctttcagacttcctgaaaacaacgttctggtaaggacaagggttgggctggggacctggagggctggggggctggggggctgaggacctggtcctctgactgctcttttcacccatctacagtcccccttgccgtcccaagcaatggatgatttgatgctgtccccggacgatattgaacaatggttcactgaagacccaggtccagatgaagctcccagaatgccagaggctgctccccgcgtggcccctgcaccagcagctcctacaccggcggcccctgcaccagccccctcctggcccctgtcatcttctgtcccttcccagaaaacctaccagggcagctacggtttccgtctgggcttcttgcattctgggacagccaagtctgtgacttgcacggtcagttgccctgaggggctggcttccatgagacttcaatgcctggccgtatccccctgcatttcttttgtttggaactttgggattcctcttcacccttaggcttcctgtcagtgtttttttatagtttacccacttaatgtgtgatctctgactcctgtcccaaagttgaatattccccccttgaatttgggcttttatccatcccatcacaccctcagcatctctcctggggatgcagaacttttctttttcttcatccacgtgtattccttggcttttgaaaataagctcctgaccaggcttggtggctcacacctgcaatcccagcactctcaaagaggccaaggcaggcagatcacctgagccccaggagttcaagaccagcctgggtaacatgatgaaacctcgtctctacaaaaaaatacaaaaaattagccaggcatggtggtgcacacctatagtcccagccactcaggaggctgaggtgggaagatcacttgaggccaggagatggaggctgcagtgagctgtgatcacaccactgtgctccagcctgagtgacagagcaagaccctatctcaaaaaaaaaaaaaaagaaaagctcctgaggtgtagacgccaactctctctagctcgctagtgggttgcaggaggtgcttacacatgtttgtttctttgctgccgtgttccagttgctttatctgttcacttgtgccctgactttcaactctgtctccttcctcttcctacagtactcccctgccctcaacaagatgttttgccaactggccaagacctgccctgtgcagctgtgggttgattccacacccccgcccggcacccgcgtccgcgccatggccatctacaagcagtcacagcacatgacggaggttgtgaggcgctgcccccaccatgagcgctgctcagatagcgatggtgagcagctggggctggagagacgacagggctggttgcccagggtccccaggcctctgattcctcactgattgctcttaggtctggcccctcctcagcatcttatccgagtggaaggaaatttgcgtgtggagtatttggatgacagaaacacttttcgacatagtgtggtggtgccctatgagccgcctgaggtctggtttgcaactggggtctctgggaggaggggttaagggtggttgtcagtggccctccgggtgagcagtaggggggctttctcctgctgcttatttgacctccctataaccccatgagatgtgcaaagtaaatgggtttaactattgcacagttgaaaaaactgaagcttacgaggctaagggcctcccctgcttggctgggcgcagtggctcatgcctgtaatcccagcactttgggaggccaaggcaggcggatcacgaggttgggagatcgagaccatcctggctaacggtgaaaccccgtctctactgaaaaatacaaaaaaaaattagccgggcgtggtgctgggcacctgtagtcccagctactcgggaggctgaggaaggagaatggcgtgaacctgggcggtggagcttgcagtgagctgagatcacgccactgcactccagcctgggcgacagagcgagattccatctcaaaaaaaaaaaaaaaaggcctcccctgcttgccacaggtctccccaaggcgcactggcctcatcttgggcctgtgttatctcctaggttggctctgactgtaccaccatccactacaactacatgtgtaacagttcctgcatgggcggcatgaaccggaggcccatcctcaccatcatcacactggaagactccaggtcaggagccacttgccaccctgcacactggcctgctgtgccccagcctctgcttgccgctgacccctgggcccacctcttaccgatttcttccatactactacccatccacctctcatcacatttccggcgggaatctccttactgctcccactcagtttccttttctctggctttgggacctcttaacctgtggcttctcctcccacctcctggagctggagcttaggctccagaaaggacaagggtggttgggagtagatggagcctggttttttaaatgggacaggtaggacctgatttccttactgcctcttgcttctcttttcctatcctgagtagtggtaatctactgggacggaacagctttgaggtgcgtgtttgtgcctgtcctgggagagaccggcgcacagaggaagagaatctccgcaagaaaggggagcctcaccacgagctgcccccagggagcactaagcgaggtaagcaagcaggacaagaagcggtggaggagaccaagggtgcagttatgcctcagattcacttttatcacctttccttgcctctttcctagcactgcccaacaacaccagctcctctccccagccaaagaagaaaccactggatggagaatatttcacccttcaggtactaagtcttgggacctcttatcaagtggaaagtttccagtctaacactcaaaatgccgttttcttcttgactgttttacctgcaattggggcatttgccatcagggggcagtgatgcctcaaagacaatggctcctggttgtagctaactaacttcagaacaccaacttataccataatatatattttaaaggaccagaccagctttcaaaaagaaaatagttaaagagagcatgaaaatggttctatgactttgcctgatacagatgctacttgacttacgatggagttacttctgataactcgtcgtaagttgaaatattgaaatattgtaagttgaaaatggatttaatacacctaatctaaggaacatcatagcttagcctagcctgctttttttttttttttttttttggagacagagtctcactctgctacccaggctggagtgcagtggcgggatctcggctcactgcaacctccgccttctgggttcaagcgattctcctgcctcagcccactgagtagctgggattacaggcacctgccccgacgcccagctaattttttgttatttatttcctttttttttagtagagatagaatttcaccatgttggccaggctagtctcgaactcctgaccttgtgatctgcctgccttggcctcccaaagtgctgggattacaggcgtgagccaccgcacctggcctgcctagcctacttttattttatttttaatggagacagcatcttgctctgttgcccaggctggattacagtgatgtgatcatagctcattataccctcctgggctcaagcaatccccctaactctgcctccccagtagctaggaccacaggcatacaccaccatacccagctaatttttaaaattttttgtagatagatagagtctcactatgttgcccaggctggtctctagcctacttttttgagacaaggtcttgctctgtcacccaggctggatagagtgcagtagtgcagtcacagctcactgcagcctccacctcccaggctccatccatcctcccagctcagcctcccaagttgcttcaactacaggcctgcaccaccatgcctggctaatttttatttatttatttttattttattttattttattttttgagactcagtctcactctgtcgccttaggctggagtgcagtggcatgatctcggctcactgctaacctctgcctcctgggtttcaagtgattctcctgcctcagcctcccgaatagctaggactacaagcgcctgctaccacgcccggctaatttgtgtatttttagtagagacagggtttcaccatgttggccaggctggtctcgaacttctgaccatgtgatcgccgcctcggcctcccaaagtgctgggattacaggtgtgagccaccacgcccggctaatttttatttatttatttaaagacagagtctcactctgtcactcaggctagagtgcagtggcaccatctcagctcactgcagccttgacctccctgggctccggtgatttcaccctcccaagtagctaggactacaggcacatgccacgacacccagctaattttttattttctgtgaagtcaaggtcttgctacgttgcccatgctggtatcaaacccctgggctcaatcaatccttccacctcagcctccccaagtattggggttacaggcatgagctaccacactcagccctagcctacttgaaacgtgttcagagcatttaagttaccctacagttgggcaaagtcatctaacacaaagccctttttatagtaataaaatgttgtatatctcatgtgatttattagatattgttactaaaagtgagaaacagcatggttgcatgaaaggaggcacagtcgaagccaggcacagcctgggcgcagagcgagactcaaaaaaagaaaaggccaggcgcactctcacgcctgtaatcccagcatttcgggaggctgaggcgggtggatcacctgaggtcaggagttcaagaccagcctagccaacatggtgaaaccccgtctctactaaaatacaaaaattaaccgggcgtgatggcaggtgcctgtaatcccagctacttgggaggctgaggcaggagaatcgcttgaaccaggaggcggaggttgcagggagccaagacggcgccactgcactccagcctgggcgatagagtgagactccgtctcagaaaaaaaagaaaagaaacgaggcacagtcgcatgcacatgtagtcccagttacttgagaggctaaggcaggaggatctcttgagcccaagagtttgagtccagcctgaacaacatagcaagacatcatctctaaaatttaaaaaagggccgggcacagtggctcacacctgtaatcccagcactttgggaggtggaggtgggtagatcacctgacgtcaggagttggaaaccagcctggctaacatggtgaagccccatctctactaaaaacacaaaaattagccagtgtgagacacgttgagtccacgtactcggaggctgaggcacaagaatcacttgaaccccagaggcggagattcgaatcagccaagattgcaccattgcactcccgcctgggcgacgagagtgagaccccatctcaaaataaataaataaatatttttaaaagtcagctgtataggtacttgaagtgcagtttctactaaatcgatgttgcttttgatccgtcataaagtcaaacaattgtaacttgaaccatcttttaactcaggtactgtgtatatacttacttctccccctcctctgttgctgcagatccgtgggcgtgagcgcttcgagatgttccgagagctgaatgaggccttggaactcaaggatgcccaggctgggaaggagccaggggggagcagggctcactccaggtgagtgacctcagccccttcctggccctactcccctgccttcctaggttggaaagccataggattccattctcatcctgccttcatggtcaaaggcagctgaccccatctcattgggtcccagccctgcacagacatttttttagtcttcctccggttgaatcctataaccacattcttgcctccacgtagtatccacagaacatccaaacccagggacgagtgtggatacttctttgccattctccgccaactccccagcccagagctggagggtctcaaggggcctaataattgtgtaatactgaatacagccagagtttcaggtcatatactcagccctgccatgcaccggcaggtcctaggtgacccccgtcaaactcagtttccttatatataaaatggggtaagggggccgggcgcagtggctcacgaatcccacactctgggaggccaaggcgagtggatcacctgaggtcgggagtttgagcccagcctgaccaacatggagaaaccccatctctactaaaaatacaaaagtagccgggcgtggtgatgcatgcctgtaatcccagctacctactcgggaggctgaggcaggagaatcgcttgaacccgggaggcagaggttgcggtgagctgagatctcaccattacactccagcctgggcaacaagagtgaaactccgtctcaaaaaagtataataaagtaaaatggggtaagggaagattacgagactaatacacactaatactctgaggtgctcagtaaacatatttgcatggggtgtggccaccatcttgatttgaattcccgttgtcccagccttaggcccttcaaagcattggtcagggaaaaggggcacagaccctctcactcatgtgatgtcatctctcctccctgcttctgtctcctacagccacctgaagtccaaaaagggtcagtctacctcccgccataaaaaactcatgttcaagacagaagggcctgactcagactgacattctccacttcttgttccccactgacagcctcccacccccatctctccctcccctgccattttgggttttgggtctttgaacccttgcttgcaataggtgtgcgtcagaagcacccaggacttccatttgctttgtcccggggctccactgaacaagttggcctgcactggtgttttgttgtggggaggaggatggggagtaggacataccagcttagattttaaggtttttactgtgagggatgtttgggagatgtaagaaatgttcttgcagttaagggttagtttacaatcagccacattctaggtaggtaggggcccacttcaccgtactaaccagggaagctgtccctcatgttgaattttctctaacttcaaggcccatatctgtgaaatgctggcatttgcacctacctcacagagtgcattgtgagggttaatgaaataatgtacatctggccttgaaaccaccttttattacatggggtctaaaacttgacccccttgagggtgcctgttccctctccctctccctgttggctggtgggttggtagtttctacagttgggcagctggttaggtagagggagttgtcaagtcttgctggcccagccaaaccctgtctgacaacctcttggtcgaccttagtacctaaaaggaaatctcaccccatcccacaccctggaggatttcatctcttgtatatgatgatctggatccaccaagacttgttttatgctcagggtcaatttcttttttcttttttttttttttttttctttttctttgagactgggtctcgctttgttgcccaggctggagtggagtggcgtgatcttggcttactgcagcctttgcctccccggctcgagcagtcctgcctcagcctccggagtagctgggaccacaggttcatgccaccatggccagccaacttttgcatgttttgtagagatggggtctcacagtgttgcccaggctggtctcaaactcctgggctcaggcgatccacctgtctcagcctcccagagtgctgggattacaattgtgagccaccacgtggagctggaagggtcaacatcttttacattctgcaagcacatctgcattttcaccccacccttcccctccttctccctttttatatcccatttttatatcgatctcttattttacaataaaactttgctgccacctgtgtgtctgaggggtgaacgccagtgcaggctactggggtcagcaggtgcaggggtgagtgaggaggtgctgggaagcagccacctgagtctgcaatgagtgtggactggggggcccagtgcccgggttccgggaggggaacaaaggctggagactgggtcagtctgcgggctgcatgacaacaagggagggggtggctccattcataactcaggaaccaaccgtccctcctcccctccgcccacggctggcacaaggttctctgcctcccctgcttctaggattgggctgcttccccctcggcagcctctcaccaaggattacgggatttaaatgtcgtgatttacgaaggctgagcctccagggtggccatcttcgtccatcagaagtggcaggatacctgggttccaagggaacagggtgg

SEQ ID NO: 36 - DNA, 450 bp, Homo sapiens
atggagccggcggcggggagcagcatggagccttcggctgactggctggccacggccgcggcccggggtcgggtagaggaggtgcgggcgctgctggaggcgggggcgctgcccaacgcaccgaatagttacggtcggaggccgatccaggtcatgatgatgggcagcgcccgagtggcggagctgctgctgctccacggcgcggagcccaactgcgccgaccccgccactctcacccgacccgtgcacgacgctgcccgggagggcttcctggacacgctggtggtgctgcaccgggccggggcgccgtgcgcgatgcctggggccgtctgcccgtggacctggctgaggagctgggccatcgcgatgtcgcacggtacctgcgcgcggctgcggggggcaccagaggcagtaaccatgcccgcatagatgccgcggaaggtccctcag

SEQ ID NO: 37 - DNA, 3848 bp, Homo sapiens
acctgcagcgcgaggcgcgccgctccaggcggcatcgcagggctgggccggcgcggcctggggaccccgggctccggaggccatgccggcgttggcgcgcgacggcggccagctgccgctgctcgttgttttttctgcaatgatatttgggactattacaaatcaagatctgcctgtgatcaagtgtgttttaatcaatcataagaacaatgattcatcagtggggaagtcatcatcatatcccatggtatcagaatccccggaagacctcgggtgtgcgttgagaccccagagctcagggacagtgtacgaagctgccgctgtggaagtggatgtatctgcttccatcacactgcaagtgctggtcgacgccccagggaacatttcctgtctctgggtctttaagcacagctccctgaattgccagccacattttgatttacaaaacagaggagttgtttccatggtcattttgaaaatgacagaaacccaagctggagaatacctactttttattcagagtgaagctaccaattacacaatattgtttacagtgagtataagaaataccctgctttacacattaagaagaccttactttagaaaaatggaaaaccaggacgccctggtctgcatatctgagagcgttccagagccgatcgtggaatgggtgctttgcgattcacagggggaaagctgtaaagaagaaagtccagctgttgttaaaaaggaggaaaaagtgcttcatgaattatttgggacggacataaggtgctgtgccagaaatgaactgggcagggaatgcaccaggctgttcacaatagatctaaatcaaactcctcagaccacattgccacaattatttcttaaagtaggggaacccttatggataaggtgcaaagctgttcatgtgaaccatggattcgggctcacctgggaattagaaaacaaagcactcgaggagggcaactactttgagatgagtacctattcaacaaacagaactatgatacggattctgtttgcttttgtatcatcagtggcaagaaacgacaccggatactacacttgttcctcttcaaagcatcccagtcaatcagctttggttaccatcgtagaaaagggatttataaatgctaccaattcaagtgaagattatgaaattgaccaatatgaagagttttgtttttctgtcaggtttaaagcctacccacaaatcagatgtacgtggaccttctctcgaaaatcatttccttgtgagcaaaagggtcttgataacggatacagcatatccaagttttgcaatcataagcaccagccaggagaatatatattccatgcagaaaatgatgatgcccaatttaccaaaatgttcacgctgaatataagaaggaaacctcaagtgctcgcagaagcatcggcaagtcaggcgtcctgtttctcggatggatacccattaccatcttggacctggaagaagtgttcagacaagtctcccaactgcacagaagagatcacagaaggagtctggaatagaaaggctaacagaaaagtgtttggacagtgggtgtcgagcagtactctaaacatgagtgaagccataaaagggttcctggtcaagtgctgtgcatacaattcccttggcacatcttgtgagacgatccttttaaactctccaggccccttccctttcatccaagacaacatctcattctatgcaacaattggtgtttgtctcctcttcattgtcgttttaaccctgctaatttgtcacaagtacaaaaagcaatttaggtatgaaagccagctacagatggtacaggtgaccggctcctcagataatgagtacttctacgttgatttcagagaatatgaatatgatctcaaatgggagtttccaagagaaaatttagagtttgggaaggtactaggatcaggtgcttttggaaaagtgatgaacgcaacagcttatggaattagcaaaacaggagtctcaatccaggttgccgtcaaaatgctgaaagaaaaagcagacagctctgaaagagaggcactcatgtcagaactcaagatgatgacccagctgggaagccacgagaatattgtgaacctgctgggggcgtgcacactgtcaggaccaatttacttgatttttgaatactgttgctatggtgatcttctcaactatctaagaagtaaaagagaaaaatttcacaggacttggacagagattttcaaggaacacaatttcagtttttaccccactttccaatcacatccaaattccagcatgcctggttcaagagaagttcagatacacccggactcggatcaaatctcagggcttcatgggaattcatttcactctgaagatgaaattgaatatgaaaaccaaaaaaggctggaagaagaggaggacttgaatgtgcttacatttgaagatcttctttgctttgcatatcaagttgccaaaggaatggaatttctggaatttaagtcgtgtgttcacagagacctggccgccaggaacgtgcttgtcacccacgggaaagtggtgaagatatgtgactttggattggctcgagatatcatgagtgattccaactatgttgtcaggggcaatgcccgtctgcctgtaaaatggatggcccccgaaagcctgtttgaaggcatctacaccattaagagtgatgtctggtcatatggaatattactgtgggaaatcttctcacttggtgtgaatccttaccctggcattccggttgatgctaacttctacaaactgattcaaaatggatttaaaatggatcagccattttatgctacagaagaaatatacattataatgcaatcctgctgggcttttgactcaaggaaacggccatccttccctaatttgacttcgtttttaggatgtcagctggcagatgcagaagaagcgatgtatcagaatgtggatggccgtgtttcggaatgtcctcacacctaccaaaacaggcgacctttcagcagagagatggatttggggctactctctccgcaggctcaggtcgaagattcgtagaggaacaatttagttttaaggacttcatccctccacctatccctaacaggctgtagattaccaaaacaagattaatttcatcactaaaagaaaatctattatcaactgctgcttcaccagacttttctctagaagctgtctgcgtttactcttgttttcaaagggacttttgtaaaatcaaatcatcctgtcacaaggcaggaggagctgataatgaactttattggagcattgatctgcatccaaggccttctcaggctggcttgagtgaattgtgtacctgaagtacagtatattcttgtaaatacataaaacaaaagcattttgctaaggagaagctaatatgattttttaagtctatgttttaaaataatatgtaaatttttcagctatttagtgatatattttatgggtgggaataaaatttctactacagaattgcccattattgaattatttacatggtataattagggcaagtcttaactggagttcacgaaccccctgaaattgtgcacccatagccacctacacattccttccagagcacgtgtgcttttaccccaagatacaaggaatgtgtaggcagctatggttgtcacagcctaagatttctgcaacaacaggggttgtattgggggaagtttataatgaataggtgttctaccataaagagtaatacatcacctagacactttggcggccttcccagactcagggccagtcagaagtaacatggaggattagtattttcaataaagttactcttgtccccacaaaaaaa

SEQ ID NO: 38 - DNA, 89603 bp, Homo sapiens
gaattctggccccacacactgtgtatgtgtgtagtgggtgtgtaggtgtgacaatatgtgtttaaagttaccaaagacttgcaggtttagggacgtgagatattacagtaattaagcacaggggctatgtcaagggttccaatcccggcataggattcaaattttgtgccttccttgtgcctcagtttcctcatttgcaaaatggggagaacaagagtatctacctggtagagttcttggaaacattaaatgagctactgtatataaagaatttagaactttggtagacgttgtcagttcttattatgattacaaactccgctgatgcttttctgcccttatcttatttgacctccctatgagatatgatacagttgaacactccagctttcctgaaaatctccttttgccacagcccttttttgcctttctgacctctgcttattgggatcctttaaagggtattttttttttttttttgagacaaagtattgctttgtcacccacgctggagtgcagtggcacgatcttggttcactgcaacctctgcctcccagactccagtgattctcctgcctcagcctcccgagtagctgggactacagaggcctgccaccacacccagctaatttttgtatttttagtagagacaggtttctgccatgttggccaggctggtctcaaagtcctgatctcaaatgatctgctgccttggcctcccaaaatgctgggattacaggtgtgaggcaccatgcccggcccctttatggggtactctctgcctgtccttacgggtattccccaaggagaggacatctttcctctgttttctttgcaatgtacattttatccagagtgacctcatgcaaatctgaggctgcagtcccctctctgcagcctggtcctgtgctgagccccaggcttccatatctagtgttaagaagtctggcctggtgcagtggctcatgtctgtaatcccagcactttgggaggctgaggtgggaggatcgctttagctcaggagtttgagatcagcctgggcaacacagtgagacctcatctctttaaaaaaattagccgagtgtgatggcatgtatctgtactcccagctactcaggaggctgaggcaggaggatggcttgatcccaggagttcgaggctgcagggacctatgagggcaccactgcactccagcctggacaacagaaggagaccttgtctccgaaaaaaataattaaaaaaaaaaaaaaagtcggccggacacagtggctcatgcctgtaatcccagcacttcgggaggctgaagtcaggagactgagaccatcctggctaacatggtgaaaccccatctctactaaaaatacaaaaacaaaattagccaggcatggtggcgggcgcctgtagtcccagctactcgggaagctgaggcagaggaatggcgtgaacccgggaggcggagcttgcagtgagctgagattgcaccactgcactccagccttggcgacagagtgagactccgtctcaaaaaaaaaaaaaaaaaaaagtccacgagcatctcgaaacaaacaggctcaactccaaatccttcactgtccactaacaagtacctccatgtcttgctggatgggagcacatgtagctccacaatacttttggtcacacaggcctattgaatcttaacttccttattcatcccctctcactattctcacctctgtggacttaattcagttccctgtttctcctgtggatcactgcattaggctccttaccattttcttcctgccttaacttttgccccctttcaagtcacccttcactgagtttcttcactatctttccaaaaatgtaaatcttagcacaacaggctgcagcttaaagtcctttagtgactccccgtagctcagaggatgaggttctcatttcggagtatttacagttcttgtctatctctgtggcctcgactctccccactctcctccaagccccatttccttgactgggcagcactccttgttcttcctattccttatgctgtttcctgcctctagccccgtgcgtttgtacttcccactgctggaacattcttctctcctttccctttccccgctcctgatccttcagagtctaatacccacctctctgggaggccacatgagctcactggacaggtgctcctctgtgtgcaaacatcactgtgcatggctctgttagagtacttcatgccatgtaatttttgcccctttattcatctctcccctcatttgctggaaatcctgtgagggcagcatctgtgtcttgtctaacttggtatccctgacacctaatacactacatctgacacagagatgttcaattaatactgaatgaaagctggaacgaagaccatacattatctcctttcagactcacaaactgtgaagtggttattgttagtatagaatctaaccgggggattgtattaatctattcatttcttcaactttatggacaaaagactttcagatgattgctgaaaaccaagaaaagctattaaaaagcaaacttgaaaaggattatactcttgttgtagtaattccacccctggttaggaatgcatacttaataactaatcagaagcaggcaagttttattcacacagacattaatcatcaagtaatttatgatagtaaaaaaattggaaaaaaaagagagaaatgattaaacacccagaattatggtacatccataaaattgaacattatactgccattaaacagtgtgtttccaaaggatttttagtgatctgtaataatgctcatgttatttgtgaaaaagctggatagaaaactgaaaatataccaagatcttaaattatgtaaagggaaaaaaacctcacacataaatagagaaaaaagaaaggaacatattaaaacaaactcttcagtgattgtatcttgagtgccttttttgttttttataatttttggtattttccaaattttctacaataagcatcttttacagtcagaaatataataaaatattttcaagttcgagattttagctgtgttagttgtatttgtgtggcattattactctttcttctgttgatggtgcatcagtttttctttggggatgcacccttccccatctcaggcctctggtgtgaagtggatccctgaccccggcttcaggggtgggcacatgactcagacatggccaatcagcatactccatccctctggctccttcccaatgggcacatgacttaagccaggtcagtgagactcggtttctcccataaacttttacaggagatgtttatgggggcaggaaaactctacttcgttggtactagtgagctgtaagcctagagctgccctgagtgtatacaaggttggcaaaacaacacaggaaagtattgaggataaaggtggaggaaagtgtacgtgcacttgtgcacacatgcatccacacacactcgcccttcaagtcctgataactttgagtccttggatctaggaaagtctgaaacactattgtccctggactttctggttataagagccaatacatttaggcttctttgtttgcttgcttaatttaagctgcttctataagttgcaatcgagagtccttgctaaaagaattatgaaaacaatgaaatacataaagcacaatccctgaacatgcccaggactatcacaaaatacagtatagaattaatccatacatcctacctgagatataaaacatttccatcattgccaatgttccattggacactgctgatctataatatagttccttatatattacagcatatatgtccactcatagtgccttatatatatgcttcctttctttatgtaacaggcagtgggtattattaaaaacagctaacaaccctaaaggtacaagtactggaggctctctgttgtggccagcattaaaattttaattcctggatctaaggagatttagcgtgtctcaaggttgggctgggagatattttagggtatggttttttttgtaatcagtacagaaggatttcaatattgtgtcaaccaataaggccaaattggtgtgtactggctgaacataagctctgttagcagatattatagtttcttacttgagtacctattttccctgctggactgtgaattcccctagacagagactttgtcttactcatttatgtgggtcttatgcctacctaggtgctcaaaagatatttgctgaatgaaaaacaggaatgacggtccaacatggtataactccctattcagtttttttttttcctgatagaagttccgtgcctagaattaaattgcaatatggtctcttttcacccactcttttgaagatgttatcctctccaatatcagctgattgaagaagaaaattgtaaattttctctctcaggcataatgttgatattttaactcatagtgattttttctcaatacaaaatgaattttagaaataaatcaagatcccagaaacttatgattgctttgagtggtatcttttatctgtcatcctaagaaaaacatgagatctgatggcccagagcacagagacctttggtatttcagttctcctacagccgcatgactcgaaccttttgctgggagattgggatgtaggtccccatacttgattataaggactgtgagggcaggggccacatctgcatatctgtctattaataatagtactcctggtacctagctcctccttgcttcacagcagacactaaacaaatgcttgctgagtgagtaaatacttacatttaaagagaggcaattatacacattgatcatttgatcaccctctagcactgataatttttaagtgattagctttaaaaatcatttttcttacatcaacctgggtcctcacactattaaacaacaggagagctttcaatattaaatgaagtggggcagctgggcaactgtaaattttggatgatacttcagagaagagtctaggtgtatctgttctatccctttttctgatgggcatctgccatttatttttccattcttaagctctcaggagggatgtcttattagtttatcagaatgcatagggaaagctcatctttcttggagtaggtcttccaataagtgttcaagccctgggtcttccctcactacaataataaacatacctgctctaccctcctcacaaagctgttatcgtgagcatgaaaagacgagtcgctgtggggaagaactattaacccctatacagatactgttgttgctttccgttcaaggatccaccatgagactgtgggtaaggcactttctgggcagtgaaatcgggcttaagagaatcattgtacttttattttgctcctgggaccggcaagggcagttaagagccctagccctaaaactgtcgtctgttacagaggcagagaaatcattactggggttggcagcgttggggggaggggggaaaacgtgtatgaaaacctgggctcccagagcaaacttcgccacgcgccctccatcgcccctgtctccacacaagtcccggcaggggcttcttgggcggaggccacgccgaccaataggaacccactgtgttcctacaggttacgaagcaggtggagaaattgagcagaaacaattagcgaaaccgggctcagcctttaccgcggtgccaggagctcctaacaggcctggaggggaatgtcggggctcaatttcctaacgctcccctccccatccccatgccacctccacgagcagcggcgtccagcctcctcccgcccgaacgtgctcgaggggcgggcagtcgacctttattgtctggggagcacctggcaggtggcgggcccgtgccctaacgtgtgcgtggtgcccagcttcacaaagcgagcgggcagcacctccttggtccgggaacggcctcagcctggccgtccacatcccaggggtggaaaggtggagagagaaaggggctccggagtcaagagcggggagagagggcgcgcgcgccctcctcctcccggcgggcacggccccccggcattaacacgtcgaaagagcaggggccagacgccgccgggaagaagcgagacccgggcgggcgcgagggaggggaggcgaggaggggcgtggccggcgcgcagagggagggcgctgggaggaggggctgctgctcgccgctcgcggctctgggggctcggctttgccgcgctcgctgcacttgggcgagagctggaacgtggaccagagctcggatcccatcgcagctaccgcgatgagaggcgctcgcggcgcctgggattttctctgcgttctgctcctactgcttcgcgtccagacaggtgggacaccgcggctggcaccccgaccgtgcgactactcggcgaagcctgtgcctgggagggtggtacccgccagggtgcatccggagagaggactgcgggccctcagtgcccgtgcgttccagcctccggggagactccaggtggccctcggactctccggcgccctgcctcgctcacctgcgcgaggagaccccagctgctggtggtgggggacgcgaatccggggttcttcgggaatggggacagcaagagggggttaggcgtgagcgaggctgcaggctccgtgcgagtttggggtggcttttgtgccgacgttgcgcggggggcggaggcggggggctcaggggtttgcaccgagcgccttctcttgccgtgcgaggcgcggccgcagcttccttttgttaaaagttgcgtgtgtgtgaccggcgcccgggaggacctgcctgcaggttctccgccgcgctgagggcaaagttagagagccctttctctgctctgcggctactgccttccaaccgcaggcgctctttgtgcccagagctggggaccgacccgctgccgcctctgctcgcggcgccacccgtggagaccaatcgaaggctgcggcgtttccccgcctccgggttaggcttttgcgctgggagtgcgcggcgtggggctgttgtggggccggactcccgcgagcctggaggtggtggcgacagggacaacttgggcagggcgtgtggaaagcagccgctaggttgcagactttttgctttcgtacatcccgtgctcgcccctttctgccgcggcgccgtttcattcctgccgcgcgccccggggcggctggaggctgtgtttgccgcctgctccgggaaggcaagggacagcgtgctgggactctgcgttccctgactccaaccgcctagcacgccggccagagtgcccggcctgcctggcgggttctgaaagcccctagttcccggtgtctgcgacctgtattcgcaggtcctgttttcttcggaaatttttgagattcgtgaccgcccgcctccccgcccccgggacttctatacttcagggctgcctgggggtggggtgggagatggcgtggaactttctgcaaatcctactcagttcttaaagctataacagaaatccaggtatatccgcgcgggaactgggtcttaggtgaaggatttgcaggttgctggagccccttggtcagattcctgcctcccgttcccttttttccaggtgtcgctggtgcgggcgagtgcaggtcgcccagctcacccctgaagccctgctatctcccaggtcattttttaaaacaaacctttaaggttaccctgatgatgtaaggatagaaagtgagtcttagctggaatcaagcgcttgaaaggaagcggcgcaatgaacggttttgagactgtcgactaccggtcagtttctctataaagtctccaggcgcagtctgcagcgtcctggacttgtaactattgtgagggctttcctgtggggggcagagaggccttgcatctggacccctgtgcagcaggaggggtcagcaggggtcacgagggagtgttcggattctctggaggatttgatcacctagcttaaaacaacacatctggtctttatgtttttgtgccttgacctttttaatatcagttaagctatgtgaactagaacctagtaggagactagaaagaccacatcgaatatctcccttttaaaaaattaaaagaatcaatggttttcttctccccaatagatttttggcaaagggaattttaaggtctgtctcctgggggggcagtgtggtgtaacgacaaagccttgctctgtcccctgggttctcggtttctctgccatttcttggctgcgtgcccttggccaggttgcttagggcaggttgcttaaattctgggaaacgcagtgtcctccagagtacaaggaggcatctgcatcatgaaggatcctttgggtccagaattctcctccaatgttctgagtgtagactcagcactctttttaactattcccctggcccctgtctgcctctttgaaattcctctgcctctcctgctcacagggaagtcatagagtatgggtgcatctgaccggtctgcccctgactgaagcaaggagctgtggcttatgcttactgcccttcaattcccatatattcctctgcattgccctttgagggcccccgccccccaagtattacagctcctgtgcctaacaggatgaacctgctaggaatagtgaatcataccttccccgtttcgttcctgcaggtgtgaggctggagtcattctcagcagctggacacaaggcactctaaattattatcctgctggaaataagagaccccagataattcatttatccctattctgttttttcccccactcattcccattttttttctcatgactctgtaaatcatgtaatgctatgcatttatagcatgctttctaatgggccttaagtttcgtatgacatgtgtggtgtacatagttgttgctcttcagttggaaactgtgtgccaggccttttgcttggggctttacctatttctagtagtctcaatgagcctaggaagtagtactattattacccctaacattttacagctggagaaactggctaaggataagccctaaatcatcagtggtgaagcctgatgagattggctgcatgtgcccagctctatagccattcacatgattcaccagaatctgttgtaagactcattcaaaaatatttaatgagtttttactatgtgccagggattgttggaagttctgggaatacaggatggccaatgtcactaccttcccaattttggtgaaaaatatttagaattgcgtgtcttatgaaagcggattatttgtggagggaggattaattaaattttagcttggaggaagggctgtaggcatttgaccctgtggtatgttggcttagttgttagctatctcattccagttagcgtccctcagaaatgaaggtaagctgtttctaaaaggatgatgcaagccagttaaaaatccatctcccactccaaaacataaaaatggtcttgtgcataggtgtgaaagagaacacccccaataatggctgatgtcattggctatttaccctggatagcatggtgagaaataatgacaatctaccatccaaagccattttttctcccaaaagaaattctcatcagaaatgtgccaagtattctgcgggcttcccttggagaacatttatgtacagatgttgtggtggtgatgaattttgctgctgttgttgacagcccttcgaagttacccttagggttttgactcatttcctcaagtctcttccagctgattaaagaaggacacgaggaaatgaacctcggtgtctctagcggaattctcagagctggcctgcagtgtggggaccccttcaaggtagtggtcaaggctgtggcagctttttcttcagaatgaatgtagtttaagagttggcaggctaggatgtgggaaatgctttcttttgctgcattaatgtgcggtaacttttaaaagttgagattgaatgacatttgcaggaatccaaatatgcaaatttcatgtgcagttttggtaacttgaatagatattgccacagctataagtccggattgaagaaggcctggggaagagttagaggaggtaaaagtttgcctggagggcaaatccagtgtaaatctttgttgtacttagagaggaattgagttgagtcatagagaggaattgagttgagtcggcttggcccagcagctctgatttctgacattttttggatgtgatcatacagctcatcttttgacctaagactcttaataagtaaagagcagttgtaatctgatagcccgaggagacatgttttctttggcctacatgatgctttttagaaaacattgaggcgatattaaacaatctagagattttttttaaatcaagatctctatttctgtctcctctttaagaattgaaggtcatggcccctgtagatgaggcctgtgctcttcaggttgcattaggctctagggctttatcctgccatcccttaggcattccccactgggccctggtgagtgcaggaatccaaatatgcccctgggaccaggcagatgacaagtgggaggagacaggccggcctaccttgtgttggtctgatggcttcatgactgacagcttgatggccttagagcaaattgtttaacctttttgagctttcattgtccatcctagttttgccacttattagctctgtgactttcggcagattacttaacctctctgtgccagtaaatgtgttgctacatgtaaaacttttagagtggtgcctcatagtacaggctcaatatgtgttagccataattatcgtctgtaaaacaggaattattattgtccctaaaatgggaataatgcctactcttttaagatgattgccctaaagattagaaaggcattttttttgtttgttttaaagacagtatcttgccctgttgcccaggctggagtgcaatggcgcaatctcgtctcactgcaacctccacctcctgggttcaagcgattctcctgcctcagcctcctgagtagctgggattacaggcacccgccaccatgctcggctaatttttgtacttttagtagagatggggtttcaccatgttggcctggctggtctcgaacccctgacctcaggtgatctacctgcctcggcctcccaaagtgctaggattacaggcatgagccaccatgcctggccgacagttttaaaaataagctttaatttttttggtcttgttttatttagcttttgataagagttaggaaatcactagtcctagagattgaatagatcttgaactttttttttctccaggggggaaaaaaaaaaactacacatcttgtaagattctccaacataacatttgtgtctggtacttttcccattcatcttatgttttagctttcatgcttacattttggttatgacacacttttgttagacatcttcccatgcatacctttctgacaggttttcaacatttttgcaaaatttaaggtttaagccaaattattattcaggacatgtggcatcagttaattacgagcttgggctctgaaattgacacgctggatttttattccagttctgcctcttccctgctgtgtgctctgggacaagacacttaacctctccttaagcttcatttcctcatctgtaaaatggagatgatgacatagggcccctgcgaggattaaatgagattctgcatgtaatatgcttagcatagtgccccgcatagaggaagtgtgtggactccactatcaggctgattttcttatgttcccctttcagctttgcctcttagaaaaaaattgaaaacgtgtaaacagaatatgtagagtggtttttttttttcgtattaagatgaagttgttaattagtggtaatgcatgtttatctgcttggctctttgtttagccgtattcttgggttactttccaccaaaagagatacaaatttcttgataaaagtttaggttgggggaatgtctgcaaatggccattttctgtaggtgaataagtacatgtagttcacctagggtccatgaaagcagtcaaggagcttttccatgactgctttcactaggagttcaaggaccaagctgaacttgtccattgccccaggctagacacagcggttagtgttcagtaagtattagtttaacatcttttctattctccagcacttacactaagctttgaacataaatggtcagtaaacattttggattcagtttaacaaaggcttatcaatccccatgccttggtcctacgttacaggctgggggtggaggagggccagggcaagagcacagcccctgattcgaagtagaatttggttttcttaagtgtaaagtgctctgggcaggattttcaaggagatgagcttaaatcttgatgggcaggtaatagagatcaggaatcagtaagagcatccacataggagataatatttgagattaatttctgaaccttaaaggaagagggcagtgtagttgtggcttcagctgaaaaaaactacagtacaaggaacaaggcattaggatcttacttcaggattatcaaacctttctattggtatgatggctgggggtagggaattggctgggaaggtaagactcctcttactagcctcaaggagcatggagggaatgtgtatttagtgctgagtttggtctaggttatgaagaatgctttgaagtcaaggctaaggtggacttgacccaggagtggccccccaggctttgcatactagtccagggctgcctgttccaccattctgtccaattagacatactccccagcctgttccaatagtctgacgaagcgagaggccaagccctgccttaaaacttggacactcccttgctgtgggcaaccaagactaagggagagtctgtttttattatttatttatttatttatttatttatttatttatttatttatttatgagacagggtcttgctctgttgccaggctggagtgcagtggcacgatcatagttcaccgcagcctccacctcctgaactcaagtgatcctctcatctcagcctcctgagtagctgggaccccaggcgtgtgccaccacaccggctaatttttttatttctatttttgtagagaatagtctcgaacttatgagctcaagcgatcccccagcctcagcctcccaaaatgctggggttacagatgtaagccaccacacctggcctgttttttttttttttaatagtaaaacatacataaaatgaaatttactaccttaatcatctttaaatgtatatttcaatagtgttaagtacattcatactgttgaacactttcatcttgcaaaactgaaattctatacccattgaagagcagctcccctctccttcccccagcttctggcaaccaccattctactttctgtctctgaatttgactattccaggtaactcgcaaatgcagaaccatactgaatttgtctgttttttgactggtttatttcacataccgtaacatcctcaaggttcacccctattgtagtataagtcagaattttcttcctttttaagactgaaaaatattccattgtatgtatagaccacattctgtttacctgttcctcctttgatggacatttgggttgcaaacaatgctgtaatgaacatttgcatgtaagtatctaagggagatttttcgtggagactatttaggagggttaaactcatggctgcgagctacatgttggggagctgggcagaagatgggctctttagattatctctgagtgaaggggtagtggacctgggtattagggtacatgctttggaaagaaagcgcccttaagagacacgaggaggataaaggtgcaggtcttctctcattcggcgtatttatgggcaccttctgtgtgtcaggcactgatgagattgaggggaaggagaactggaattatcatgggtgtaggtaactgggagtattgttgatactatggaattagtggaaataaagccaagaggaggggtggcctatttgagggagagaatatgatgttggactctgctgggtttattcattgattatttgtgagctgcattttcttgaaactcaatttcacagacatggagggaagacgtcaatgaaatcttagggtcaggtccctgtaagaaataaaactaaaccccaaagtcacaaaacatggctctataatattacggtagcattggggattataaagaatggtatgttaactgtgaaccagtcttatggtgaaaagtaagttttcatgaaaaggagtgtatactaggaagagaatcctgtattcttctctgcattaggccatgtttaaggtatgttttttgtttttctcagaataaaatggccatactgggtatagaggaggacatagaattgacgaaagctttgggaaataggtcctttgaaagcaacttaaagaaattggatttattaagcctggagaagataaggtgagggaaggtttagtgaatgacagtcttcaaatatttttagtgtgtgagtgaaaagtagaacaaaatgagagtcatttaaattgccccagaaggaaattgaaaatttttttgtttttgttttttgttttttttgttttgttttgttttgagacagagtctcactctgtcgccaggctggagtgcagtggtgtgatctccgctcactgcagcctccacctcccgggttcaagtgattctcctgcctcagcctcccgagtagctgggactacaggcgcacgccaccatgcccagctaatttttgtatttttagtagagacggggtttcaccatgttggccaggatggtcttgatctcttgacctcgtgatccacacacctcggcctcccaaagtgctgggattacaggcgtgagccactgcacccggcaatttttttttttaagggaaaattctttcattagaagggttggcagagactttattcagttatagggcctttgctggagctgtgaagaaaaccaagtaattgtcattttgaaatggttcttaggtcctccccaactcagttggtttgatggccctttaagggcctgcctgaaatcgtttgggaataattcagaaatgggaaaataaccaaccgtttttctttcctcactgccttggctgtggggcagagtttctcataaatgctgaatagactctaacataatccactactatagtcacaatttcggctatattgataacagcaagtaaagaacccacagcctaaaaatgggttattgatctgttaggtgtggcgggatctaaacacagaagaaattgtacggtgtggtagcttaaactgagtgtcaaaataagacaaaaggaagctcaaggtctagagaaatccataatctatcatttagccctaccctaagaatcgctgtgctataacgcagcatgtaggcagaaagtctgtaagcatgaaggacggctcccaaagtccttttctcttgattactcaggggtggattggttacccaccactctgactaccctttccatctgtcctttccctctggtcattttgtggtcatggctcagtggcacgtttgagatcagcccatggtccagtggggaaggtggtagaaatgacattgcaattcagcagctactgcttgataacattttattaatacctgtcactttgaaattgatgagtcttaagatgggatccttgcctttaaggatcctaggacctataggaagatggtcctgggtaggcgccaatgttacaggatttgtaataagatttaagttaacaattccagtcctattcattaccattggtttggaggacataggcatcacttcttgaatggccaattgaaaggaagataggggcctgaattaaatcttaaaagagtggggtggaatttggtcaagatgtgaagaggaaaagcaaaggttagagttagccggaaggctctgctcccgccgacagaacgtctgtagagagtagcggaagatgagatgggataatttttagggcacctggatttttattcttcaataattgaagtctttcctgcagtgctatatgtgatgagatttttgtaaatgtaatctggctaagtagttgcctattcagagaaataacttttaaaaatggaaaagtatggatatcacttttgcatgtattacctgtgttgtatgttcgatcgacatccagtatggatatgtattttgagttgtttttaagtccaaggctaattctgctcccttctccctaccgaccttccccactcctagccaagattagagattttgtgggctcaacttctgattgtggcagtagatgacctttcatttgcttattaacatattttaaatatttagcaaaataatacaccttgtttatgtcagtttattcattgaagcaaagatagcaacaaacaagcctgcaaaccttgataaggagcctgtgtggtttggaacatcttgagattcttccctggatccccccgagtcctgttttagaaacctattaggggcacactggtggctgccctccccaacccagggagtcttcggagggaggaggaggtggctgtttgtggtgggcagaactctgtcacttaaggaagaggcgtgtctgatagcacttgccagtagtgaatgcctcattcttgaccaagtagaaaaaagataagagggaaaatgaaaaaggtgaaacggttctcctttaccttgtattttaaattgcttagtgaggcaaaatatccaccttcatttgggtttaccccaggtaactcatttcacagggtgttagaacatttcagagggtgttagaaaattccaaacaatggccgggactcccagtaatttaaatataatggcctatgcgggttcttaagcagaggaattagttaacagagttagaacaaaggagagcattatcacaaagagctctggaagttaatgtgtctctttttattggaaaagaagtatttctagaacaggattcaattggcttctggggaaaatatttactggagattttagaagtgtgaaaggtggcaggagacgttggctgtctgttattctacttggctagtgcacacttaaaaataaaacaagactatgttaaaaagatcttgagaattctacttggaaagactgaagtaaagatagtacaggtacttttcaaaggatataaattttggcttataaagtattttaaatgcaattccatcccaactttcacaatgcagacttcctttttagtggctgatgttgaaagaaggtaccttagaaagattttccatttaagaaatggttgatattgatatttatttggctgataaaacaccacaaggactggtttttagaattttttgtcattgttaaatcaagccaggattcttaacctaaaatatgttaggatagctaatgaaaatacttaattggaatgtttaaatgtttctctacttattttagtatagtctgtatatgtgcagctgggaaatagtatatacgtttttagccgcaccaaaaagcatcactttgataaaagaggaccccccccccttgcttttttaaaataaaccagcatatgtagaagggtttgtgagtttttttagtagatctgaatgtgttgcccaatttacattccagcattttcaagggatattatttaacatgatcatcttggtttcagaaccactgcctttcaaagagtctggcccagagcattgtgtgtgcctgcgagtgaggtgggtcccccacggggtctagtggctttgcgccatactggccactgggaacaccagctctggcggtacagcaggggtacttaacattacagctttattcttcattcttttgatcccttctgtatctttaatctgcccttataccagaaatccatagatttattcacaaataattattgaagcatcggaggtgtagtagtgaacataccaggcaaaagtctttgtcctctcttggggcttatgttttagtgaattatttttctctccaggagagagaaaagtccaggagtccagaaaggaaaaaaaaaaaaaaagaaagatgtaatttgaggggctatcatagaaagcagtttaatttagacttatttcagttccatattgtggttagttaaggaagaaagagaaaagaaaggtgatgcagagggtcagagggtaccagttcaaaaaagaggaaagccaaagaaagcaactagaacaataggaaaaggagattcaggggctgggggagatgggcaggagtggagtcagggaagctttgtgaggtgcttttcactacctgccaccagtgctgccctccagagggctgagcaccagctccatcccaccatgtccctgccccagtttctgtaacttcagagcagcaggcctcttgattcaacaggtgtttttgatggaggatttacccaagaggattgactagtgataggtgtcttcactttcaggacctttggagcctttaatgtgctttagtctgcaggtttggaactgtttgttctggaatgtgccggaatgctctttcacatctgagagagatgtttcagggtccaggctagatgctctttggtatctctccaaggactggagattctgcccctctttttaaaattcattcatgtttttcttaaaatatgaccgaactcctaactcttgctaaccttacacctgggattcttaggccctcagctgaagaacttgatgaatttcaactttaaagaggttcttctaacacttggccatttcaaccaggctttgctataaagtcctgtgaaattgggggactgaaagctaattacttggatcacaagttgcctgtgaaaactgcaaggacctgctgtcagggctcattaaaccccaaagtatggcaccttggcatgcagactactctgaccaagaggagactggaaggcctcagaagccaggtctctgttctttcctcctggttcctgctcccttttctcccgcaaagtgagtcacagaaaccagaattctttttccccaaggcaggtcatagaaactagaactcctctctcccaaagccagtcataaaacctagcaagttcactctcccttcttcctggaagaccctcattcccgaggggtcctgccccatccccaggggaaggggaattgtacagagcgggcttgctgggtttcaccactctgtccatcactgttaggccagatcctttgtgtccaatcacttttctgcatggctgttcattcatcaaacctaaatataaaaataaaggttttccctggggaaaaaaatatgacagacttcagttttaataataactgttgtaataactgtcggtctgtttgacacggtaccatttagccaccatcagccctactgcatgtcaagtttcaatgctcctgttactgtagctggcctgggtgaggtgccagcagagaggtgacagggtgacttcatccggctttttgcgttttcactttagagtggcctttcacagttccatgaaatgataagctctccagtttcaaatgaaggacgcctcaaattgagaactgacaccattgcattcctcaggatgggaaagttccttctccatcaattcttgggcactggagtaggactcttgctgcagatggtattgttctggttctcgagaaggaatccaagataaaggctgtctggggataaaagtggtaccctcttggaatatgggcaggaaggcatccctagtgaccatagccttggttgaaggtattaaggaggaatcttgaggtgcttgtctgggtgtcagttgacaatttcaatgaaattagcagcattaggtctataggtggctgcttaactaattatgaactcagctgcttaaatatatttgctccaggtttcacaattccttttatttacagtaattatcactggttagcacctattgttttgggtgagaatttcagggtctacatttaagtaaaccctatttaaatttattagttgactagggaagggttaaaaaagcagtaaggagtctatgccttctagagtattccctggcttgtttgaaaatgtgttagcagccatttttcaatatgaaagaactgaactttaaaaaaaagtatatttttatttatggcaacatttcaaataggatagtgtaatgaaccctcatataaccatctagcttcaacacttaccaatacggcctctacccactttatcttcccattattgggaagcatgtctcaagcatcatagaatttcatctataaatattttcagtatgtagtcctaaactacaaagaccttcttttctgaacataatgatgatgccaatgtcaaacccttccaaataaatataattacataatgtcattgaatagtattcacattttcctattgaagatacataaaaatataaacaaatgtatgcacatttaaaagaaagcaaacaagatctacacattgtaattggttgatatgtcctttaagtcatttcttctctgtaggtgttagccccgttttggttaaggaaactgcagttgtcctgtgcagcttttcattctgattgcattccttggtcttcacctgtaccattttgaatatttcctgtaaattggtgacttagacgtttgatcatactcagtttgattttttttttaatgagggtactgtgtaagtggtgtgttctcttgttctgctttctctttttggtgtacctttgggtatttgtgaagattcatattttttgctagatttgtatttttggttttaatggttgccttcagactgatacctttctataatacccttgtctgctgtttttgtgggggctattttccattgttgctaccataatatttaaattagccagcgtttgttctttgctctctctttactctcctgagctggggattggaagtaatattcttttacttccagttaatatctaaaaggcaatcagcaagcatattctacttttcggaacttcacctattccccatttttctgatggctatactcatttttcagagcatacagcaattatatactctgctgtctcccttgttaccatcatttagtcttagctctacaggtaaatatctgtttaatgctggcggccagtctttatatcatggctttcctggcattttggttttctgaaacgcaccctctaatagatgccttatgggaagtagttcctgaattatatgtccacaacggcgagtgtgtagtctgtatatttaaaggtcaggttggctagtataaaattgctggcccatcttatctttgcttggatacctttattattttactgtattgcattttgccataaagtggcgtcaaaatctgatgataatcttattttctatccctcaaatttaacttggtatgtttgcctagatacccaaaggaatgtttttccacctttattctttaaagcccactagttagttttatagtattggctgctgtaggttgattattttttttccatagacacaatgtgctcgctgctttaatgtgtaattttaagagttcttttttatttcctctccaataaagatttcatttaccatttgttctgatctttgttggctttaggaactcccattattcatgttagaccttcttagcctgtattctgtatctgccactttctctcaaatccttttaaccgcgtcataattcatttgaattgaaaaattttcctcctttccgtcttctggttcatttaagacactgttcatttttatttgctctcgtgttgtctttacctgtcatttctgaaatgattattttctttatttttaattcttagttcttttgcctccatttttaaatcttcattttcttcaatcaactcatttctgagttttaaaaattctgatttatgctgttcttcatagcttctttcatttagttaatttctcttggctccttctgaaatattaggtcatagctttcctttgtgcccttctggcgtgattttattgtttacacgatggatgtcattctgctccttagtttttctttaaaaataactatgtggaattcaactggattcttttctgttgttaaccgagttttcctatacttttaggagggccagtgtagatttcctagcatcagagatttaggagactctgttagttgttttcattttattttattttatttttgagacagagtcttgctctgcctccctagttcaagtgattctcgtgcctcagcctcccgagtagctgggattataggcatgtgccaccacgcccagctaattttttgtatttttagtagagacagggtttcaccatgttggccagactggtcttgaactcctgagctcaggcaattcagccgccttggcctcccaaagtgccaggattacaggcatgagccaccgtgcccggcctcatagttgttttcataaagtggtaataaaaatatgaactctactttcctatatcctaagactttttttttgtccctacccacactgcttacctgcccagactttcccttacctttgcccctatttcctcatcttagatctcatccccagcagcttctccccagtgtggggctttgccttggcttgctaattcataggagtcagacccctcccactccagaacattctggcacattggacatacaggtggcacagccctctccgcactcactaattaaactggaacttttttctctgtctactctcaggatgaccctctgagctttccagtgagtgcctgatagtggttcctgtagctgatggtagtttgtcatctagagttgttgtggatgttgtccatggtttttgagtctgctctctgtcagtttttatggttggggagagtcaataattatgctgccaccaccatcttcccagaatctatattgacattttaacacaaaatttggcaacctttgggtcaatgaaatctggataaagtcctgtcttgaaatctcaactcagaggtagctgcttttcaaaatgatttgcttccaaaataagttattaaaaatttgtaactatctgaaaactgattactatggaaatgaacactgtatggcctacctaacattagctttctaagcttattgtttatgagaaaatatagtggctgaaatcatccgagtgccaggaaactcactgctgagctattatttctgagaaaaatttataagaactgacatgcttttgtcattatttgtttggtgtgagattccttgagttctgaaggagagagtgctattttacagttttaaaagtattaaatcacatttatacttaatatcatctaataaagataacagcatttcttaattaggtgtattttcctctgattttttcccccactgaaaaatttgcatatctctaattataatcatttctggaaaaaatgctgctagggattgacatgatattaatttagatttccagaaatactaaatttccttcctccaacctgagttttcctccaattggccattgatttaaattacctactaaaaggttacaattttagaattgacctcttacccctctgcttttgggaatggccattatcctaaagccatatgaagaataaggacagatttctcaatagacatactggaaacttttgttatttaaattctggaagatagagtaagattgtttttagacatttcctcttgttttccacaaaaagattgagaagaagtaatttcaaacacagggctggtcgttaagaattctttgcaaagggaaacaggcttaatgtattgctctaagtgaatgtcacccaagaaaaattaagggaaaagtgaatactcattaagcaaattgaccagcaagcgttctgatgaatgttgaaacaaatttgaataaaccaattttgtccattagtgtgcttttaaaccaatgtgattgttttggcctaattattttctgttttgcttattcaaatgtagaatggctgcagaattaactattgcagcaattatctgattagcaatttagaaaattggtgaatggtatctgactactcaccaagaaatatctggtattttacagggctgtgtggaagaacacagactgtccagggaggatatttgctgtttttcactcactacaaatggcagctcagaggatctcactggattagtatgggctgtggatgtgggctccgggctctcagatgtagtgcaccagattgaggtctgatgtgctgcagaagttgtatttgccacccggtgtcactattctggagtcccgtagctgtgactggagaattctgcaacatttcccacttctaaagcttggggattcgagaaatctgtgcccgactggctgccaaagcttgtcagggggacccagtgctaggccgatttctaggtgtaaaagccaggcagatttgctcactcaagaaaatctgtttttgcaggtttgctttgagttccaagatacagatcctggtaaaattgtttgctgcgctaatgccctgagtttcttgtggtagctgggttcccgagtgtggtctggaccagcagcatcaggatcacctgggacttgttagaaatgcaaactctccgcccccacccaagaacctgctgagttggaaactctgagagcagggcccagccatctgttttaacaagctctccaggtgattctgctgcaggcgaaagtttgagaaccactggccttgagtgtaaaaattactgggctttgtcacagctgtcaggctgtgctagttaaaaagttaaagccctcgtggattcttcaattctcttaatgtcagaacgtcagaccagggtgcaattctcagttctccttgtgtcagactaagaaagatagatatgagtttcggttagtccagacaggaaaacagacaactggagtaccatgggacagtgctgcagtagaggcttcgagaaacctgcatgggtggagggagcaggggaagagtggtattttcagaggacaaatacgattgtgtcctaccctgattaaaacctgtcagagactgcccagtgctcttggaataaagtctgtctccgtagatccctttcaagcctccagtatctccttttgatctccattttgcacacagcacttgcctcattgttggctgtggagtgcacgctgcacccccaaaggtgtccagctcctatccacccatctgtggcctctgcaggagctgcccttctgtccactgccaggggcctcatgcttctccctggcctcctagtgcacttcacagcccagctcccacccgtcctttgcaatcttctctgacctcccagggtaggtcagatcagccctcattgtacagcgtgcttgttcgaacttatcacattgtaattacctaattgtataattattggtttattgctgatgtggagttaaatataaactctatgggtgaggggtggggaattcttgccctcttgactgtcccaagggcccagcacacagcaagctttattattggatgaatgaatggtggagcagtcctcatctttgttgttaggacacatgggctggttaatatattacattttgattgaggtgtcacctgagctttagacccctccatccctcccgcccccatccccactctcatccccaccctcgtcccaggagcatttgccaccaccatctcattctactatgggaaaggcaggtccctggcactgtggcagcgaaatttcataacttggttctaacttggggtctgccctgtgggacactagagagaagttcttgagtatcagtatttcagggatatggggaaggaagaactcctttgcttttgcagacattcataatacatgggtcagaagccagcagcctggagtaaaggtggccccggaaggttttcagggaaagtgactcttgcctcctctttcctcggggcttccaagaaacactgcctccttctgtcacagaagttgatggcaggctgggggttgtgggttgtgtttcttcccacccacttccaaatctatttgttagaagatacgcactcctttgccttttagtcaatttactttggcctggttgaagccagtgttttttattcctattctagaaggtaaaggcatggaagttgcccttcagaagcaacagctgtgcaacattgggacatttgtctaaaataagaaactcagccttgctgatttaatagaaagcttgacaatagcttataaaaatacatatattgagaatgagggctcatgttttgtgaaagattggggtttcaagacctagagggtaaagaggctgacgtgcttaatgggaatgttgcttttgatagaggaactggtaatctgttcactattttatttgcacgttgattgatgtgtggtttttgttttttacatttgaggctcaacatattctcttatacctatcgtaaacgtctgctagattaagtgaatgtaataaaacacagtaaatttgggaaaaattataaacacaattcctcactcactgtcagaataccgtagctaccatctgccaggagtgttgatagcaggaagaactataattttgtgctttgataacctatgttgtctgtttccttcatcttcatcagctgccatttttcttcatagcttcaatgcattccatggctggctcgctccttccttccttccttccttccttccttccttccttccttccttccttccttccttccttccctccctccctccctccctccctcccccaatccctgtgaggctgtctccctgctccttcacgttgccttacccccttctcttctcttcttgctgtcaagtgcagtaattatagtagtagtaacaacaggaccattttatttgagtataaagcatttaaaggatttgaagatggagattctgacctattttacccctatagatgtcaaaactgaagtttgtagaggtcaaatgagttttcccaaagtctcacattgcaatccatgcatgtctgactccaaaacccacacctgttttcataatattcctcttgttttcatctgctcacccaagctcagagaagcaccttaatttccagtgtctgatcctccttctaaactttccaatattgctgagtaaagttacaaagctggacccactttttgttttaaagctccttttttggaaataatttcaaacttaaaggaaaattgcaagattagtacagagaactccagtacaccagttgttaacattttgccacatgtattttgttttatatacatatttttttctgaaccatttgagagtaagttgctaacatgaccccctcccccacctttgctgtgcccccttgaagactcactgaaggagacagccttgtattattctatgagaaacactgaggccacccagggtgagttcctctgcctccacccaagtgcagcctttaccttgtccctctagagctgagggccctgctccaaggagtgacactgtgagctgctcacttgtgagccctttaaattaaactcatattctgaaacacatgcactgccttcctggaaattggctctctctagcacttaaaaaacagatcctcctctgtggcagggtaacacaaaggcaagtgaaaaggggctccctgaatgtttctaccaactccagagaggggagaaaggagatttgcctctgcttgttatccggagctgtaggtgaactgttctgctgctggtaattgaagtctatctgcagaacagttatcaagggcagtaaccttttttctagcaatggcctcagataaaacttgtttttcttattaataatttgtttttacttcctttggtataaaccatccctatggctataaagtgacatttttgaaagtggaaatagaaggaaaaatgtcctgtctgttcagtgtgggatggaggggaaggtgcaattttccctatttgacaggcccattaaagcaggatttcagagtatgttcactagcaaaatgtactgatttacccattataatgaaaattagcttaagtatctgagtcaagtataatttatagcatttttaagagctagaaaatcaggcctttataaaatgtagatcataattgaagacaggttttaaaaatgccttagggaaataatattaataaaatgtcaagacgaatggataaacaaaaatatagcatatacacagtggactattattcagccttaaaagggaagtcaacttttacaaatgatacaacatagatgaaccttgcagaccttatattgagttaaacaagcaagagacaaaaggacaaatagtgtgtgattccacttatatgaggtacctagaataatgaaattcatccagacagaaagtagaatcatgttgatcaggggttggagggagcagagaatggtgagtcattatgcaatatttctgtttgggatgatgaaaaagttctggaaatggataatggtgatggccgtacaacaatgtgaatgtacttaatgccactgaactgtatacttgcaaggttaaaatggtaaatcttatgtcatgtatattttaccatagtaaaacatttcttaaatgccccagttgccagatatatgtgtatatatacacatgcacacagataggcatatgtgtatgtataaatgttaatcagcctctcacttatctgtgtttcatttgatatcattcaaattagatgccataagttagaactagagtttagggttgtcacacttttttatgtcttgaagttttcattcgtccttttttttttttttttttttaatgagaaggagttttgctcttgttgcccaggctagaatgcagtggcatgatctctgctcactgcaacctccgcctccccagttcaagcgattctcctgcctcagcctgccgagtagctgggactacaggcgcccgccaccacgcccggctaattttttatattttaggtagagatgaggtttcacggtgttgggcaggctggtctcgaactcttgacctcaggtgatccacatgccccggcctcccaaagtgctgggattacaggtatgagccaccgtgccggccttatttgtcttcctcaaaactccatttcccctcctgagcctgcagggaattgacattttgcagaagcttgagtttcctgataggaggaaatttggtgattagtgaatattggagcgcctagctcacactcgcccacacccacacctgtccaggacagtgctaacatgaaggcagtttgcacttgtcaggtcctcctgcaggatcttgttgcaagaatctggtgatgcccatctgtttgtggagtgtgcagccaggaggatctgctcggaggtgagactgcaccagggctcccttttgtatgtcctaggtcttgggggggtgaagtctttgactagtgtggctgacctttgccatgctcttttgacctgtttctttttactttgttctgaattgttctttaagtgaaggaagaaaatgttcaaagaagggacgagctcgctaccccgaccccaaacttcacagatggtgagggccttgttctggtgtttattggattccaatccttagtgcttttctggttcatgtttcaatatgtgctttccagaaatcaaaacacagaaatctacatatttacggcagcggggatggggtggggggtgcggggaaacgggggactgtgctgggctgttgggaagaacccactggaaatgagaaagttcctcctttctgctcagggatggatcccagtatattttgcttgtcacatccagaccttatccaactccccaaagactgacttcataatggcagagaaaggtttcctcttagtctgtctctgagatcaaaaggggaggtctttcctcaagcattaggttgtatttttgttaggatgagtgagtgagaagagaatatattaagtagtcctatgaaggtctttgctgctggtaaggtgtgtgtatctaggagaagtctgaccacataattagctgagaaaggtccgtctttgagtgtcgaatgatacttgcatcttcatagttaattataagatgtcagagccgtaagtcaaatttcatgtttaggtccttattctaattctgtgtccaaagagtagtataaaaacaaagtaggcctggcatggtggctcacacctgtaatcctagcactttgagaggccaagtcgggtggatcacctgaggccaggagttcgagatcagcctggccaacgtggcgaaaacctgactctactaaaaatacaaaaattagctgggcatggtggcggaggttgcagtgagccgagatcgtgccacttcattccagcctgggaaagcgagactccatctcaaaaacaaacaaaaacaaagtagatgtttagttatatatttatattataagagaatcactgctattcattcttgccacaaacatttgagtgctttctatgtacaagaactgaattttctttttttttttttttttgagactggatctctctttgtctcccaggctggagtgtagtggcacgatcacagctcactgcagcctcaacttcctgggctcaagcgatcctcccaccttagcctcccaaggagctgggagtacaggcacatgccaccatgcctgactaatttttgtattttttgcagagatgatgtttagccacattgcacaagctggtcttgagctcctgggtaagcaatcctcccgccttgacctcccaaatttctgggattaaaggcatgggccaccgtgcctggcccaagcactgaatttttattaatgtaagagatttctttgtcttttttttcttttttttttgaggtggagtcttgctctatttcccaggctagagtgaagtggcacagtcttggctcactgtaacctccacctcccaggttcaagtgatcctcctccctcagcctcctaagctgagattacaggcacatgtcaccatatccggctaatttttttggtatttttagtagagacagggtttcagcatattggccaagactggtcttgaactcctaacctcaagtgatccatctgcctcggcctcccaagtgctgggattacagatgtgagccactgcgcccggccgatatttctttgtcttgaccgtttttttttttttttttagaagacagagtctcgccccgtcacccgagctggagtgcagtgacgcaatctcggctcactgcaacctctgcctccctggttcaaacgattcttgtgcctcagcctcctgagtagctgggattacaggcatgctacaccacacctggctaaattttgtatttttagtagagacggggtttcaccatattgaccatgctggtctcaaactcctggtctcaagtgatcctcccgcctcagcttcccacagtgctgggattacaggtgtgagctactgtgcccggcctgtcttaaccttccgatggggcctatgtgtttaattccaaacatacaatgtaggatgattaaatcaggataattggggttatcccatcacctcagcatttatttcttctaagcatttaattacagatcttagaattgttagtggctttagactctttactttgtcaaatgagaaaaacaaggcctagagaacctaagtaacttgcctaatgatttagaatccagaactgctatgtctctaccagtatatattttccccttcacatccttcactaattgcttaagagcaaaagtatgcagttatggccgggcgcggtggctcacacctgtaattccagcacttaggaaggcagaggcaggagaatagcgtgagcccaggagttcgagatctgcctgggcaacatagtgagacctcgttctccaccaaaaggtgggggggtggggaagacaaaacccccaaaacccaagtgtaactacctgcaaaagtatgcatttatacatttcatctaatatatacaaatattaaatatttaacagacaccaaacatttaataattttgcttgtcttctccagcctgagaaaagctttgacagatgtcctgtctctaaaacacactcactggaagcttgagtcgttgctgctgggtcctcttagtaagtttccttagaagcacacagaacatttaacatgttctctatcttgggagtgctgttcaaaaagcagaagcagcccaagggcatcttcttttgccaccaggtggcacgcttgtgaattgggaactggtggaaggaatgagtcaaggtgagggttgcactaaaatgaatctcccagctgggcaatgttgaggaatctgagtggggaaatgcttcattgcagagaatgaagtctgtctgatttgcccagagatcacaaaaataaaagacagaaaagcagaacatgaaaatgctacaggaaaggtgggatcggcacaaatgataccttggcactatgtccgtgtggtttaaggcagaaaactgaagggctgacttggccctgaggaggaaactactcagtagcagaggcaggaagggcccaaaccacaggtgaatccacccaggttgaacgcccacacagaggtgtgtgggtggggtggggtggggtggggtggtgcagcctgactgcctccgctgcaaaggatgtgcctttgtgtgcagtgtgacatccctctctagccttggcgaacctgggaaacacttcgtctcacatgtccttggaaatgtgggacccacatgtaccatgggctcctttgtaccactgagagtctcctgaaaagagtaggtccaaaaaaaggggggcttgagcccaaaatgggcttctgcaccttatggacacatgcatcagctcctgggcaggtcaacttaggagcccttctagtcatccctctggctatccctcccctcagttccttctttctttattgccatcttcctctgtggatgttcatctccccaactcttcattctgagccttctggaagcaccctgtgtcttcatgctgccatcaggcactgtcccccacactcactgactccgagggtcctccctccacctcctcccccaaactcctccctgacaccagccagtccccacagttgctgctcccccggcagcacgacaaagctcccttcttccatgtcccacttctgccataccaatggccgggcctgcttctgctgtaccagttgccaggccctgcatctagagatcctggtttgactactgtgggcaaagctctggtggttccgacatgcagctgggattgctaatgagtgtatgagttctatgattgtttctcctcactgctgtcagtggccagtcctgtgccctggagacttgagggtgggttccccatccttctctgctccccaacctactaccttgtcctgaggttctagtgtccatctattttgccattcaaagtaatggcaaaaaccacaattacttttgcaccaaccttctatagaaggccctgtgcactgtctgatctggaatttcctggttctcctttagcagtggagtcattgtcatctctatcctacttcagccaccctgggccttgtcatttctccctggcccctctgttctttgtagtctccactccctccctgggggatttcatggacaccactaccaccctctgtgtgccagtaagactccagagtatatctgtggatataccccacctcctgcctccagtttccagaacctttttgctgctgcctgctgggccaaatgcctcaaaatctgttttacccctccaatctattggcaccccatctccccatcatgtaagacaaaaccagggatatttttctccttgcttcttcactgtccagggccagcccacccaaggtcccaggctcacctggcataaagccacccctccccttcatcccaccacctctggttgatgccctcatcagctcttttctgggtcgctgactggttgtctcctggctgacctttctccaattctgttccccttgcactgtccttcactgctcccagaggagtcctcctaaaacatacatctgcagctcacccccttaccatgacggaggaggcctccgggggttctgccctctgtccctctctagcctcacaccggcagcaattctgaatgattttgtgactcctaggcactgactccactagttctgtgatatttggtcttgaatgtctctcccttctcccctgacccaagtgatagacctttctcctcttctacccctcagcctggctgcacacatcacttgttttgagccctaggaatctttttctgagccttctccacttgcccactgccttagtttcccagctcagttctacataatactctgccctgttttagcctgtacttgcttcattgtatggtaattatgtgagtctgtcttccccactgggctgtgagccccttctttgtattcccaggccaaatgataggagctcaattcccatttcatcaataaggacacgttacacaagtgcttgctttgttactgatccagccttgtttgccattaattactgacactctagctttagctttatttctctgttctgtgattcccctgtgtcaattagttcatcatctttagaccaaccttgaaatatacttaaggagctacttaaaaaaaaaaactaaatatgctgtaatgaagtctgttattttgtgaattttaaatggctaatcatttttaaatggtatagtgctattgcttgaaaccttaaactgtccaaattctgtaaaatcactaaatatcatgtacataatacagtactgagacctggcatgcagatagaacatatctttaatttttaaaagctaaacagaaatttgcattgtccaaaggaactggtttctcaggcctggacatgggaatattacaatgaaaggtaaggaggagatgatgtcaatcagttacctatcattcacctcatgactaaacctgagtaggttttttctttttcttgaaatggggccttactccactcctcaggctggagtgcagtggcacaatctcagctcactgcagcctcgacctcttgggcttaggtgatcctcccacatcagcctcctgagtacctgggactacaggagcgtgccaccacacccagctaatttttgtattttttgtagaaatgtggtctcaccatactgcctaggctggtctgtaactcctggactcaagtgatctgcctgcctcggcctcccaaagtgctaagattacaggtgtcagccaccactcctggccctgagcagattttaatcatgagttctgcctaaataattgctttaatctctgtattactggattaaagatagatctgaacttaagagaaagtgtgatccgtccaggcatattctcaaacttttccatggaactacttttaaagattggaggtaccactggtttgagtgggacatttgggaatatgtggttgtaaagtaattcagtttcttcgaaagctcatttatttcctcctgaaaaaaatacatttgattttaccttctatattacaatatgtaaaacaatatgaaagactgtttaaaattatttaccactgagtgaaatcaaccttcaagaagactcataatcaactttgggaggccgaggcgggtggattacctgaggtcaaaagttcgagaccagactggccaacatagtgaaactgcatcgctactaaaaatgcagaaattagccgggtatggttatgtgcccctgtaatcccagctacttgagaggctgaggtgggagaattgcttgaacccaggaggcagaggctgtagtgagccgagatcgcgccactgccctccagcctgggcgacgacagagcaagaccccatctccaaaaaaaaaataaaaaaaagacttacaatcaaacatcctcaatgaaaaagcattgctctgtagggtgatgccacaaattatttaaccattctttcctttctgcccctttgcatcttctgtactgtagacattccttccccctgcacttagcaggtggtatattcctggcactggacagagaccttactttggattgtgagagctcacagtttggttgggttggggtccccataggactagcttttcctgatgctttggacaccccttcatgctttgagaactttgtcttcgccttccttttccttgaatacacatagaaacacatacacgtgcaaacacatatacaaagtcttcctggctcagctctcccctacaccctttcatggtccttctgggcagcacaggcctgtagcacgtgtgtcacctcttgatgttttatttcattagcattatgtctttgtctgcacaaggctgtgagctcccccatgagcatctagttctggttacacagtacatgcgtgatgaaaggtaagactttaatgacgacggtgcattgagctccccatagtagaacagggacatttttgagattctctgttgcatggcttcctttggttcatgtgggtgattcagagttgatttagtctccccactgctgggcaagagtgttttgaggacttgtgtggttttcactgagctcatactccccctcccccatctgcatgctatttccagtatcatctctttgtttgtaaagcctcatgggtgttgtgggcgattactgggatccttccatcatggttttcatccagtttattcctatggggatataaaagtgtgtcagaaacagtataatatacaaatcattagcttttttattacgaattgtggttaaacactatgtgaaccgaagagtagttgaactacaatgcacaggctctgccccagtcacagttcttcctgctctacttccccaaaactagaataggcctaatgtggtgggttttcttccccgccattattttgtctagttccttatatttgtgtccaaaagaggacaggtttagaaaggacttccttacttttaaccgcagctatcaatccagttgttggagctttagccttttgtgaaggatagaaagaccttgcagtcatggttgacctgggccagccactgctgaagttgccggggagaacccctgagctccatcaacaggtcactcctgcttccacagatcactgcacctagaattgcagtctcaactagtctgtgaattgacatgttaaaaaaatactacaggtatgctttgaatattttatttttacgaattgtggttaaacactatgtgaactgaagagtagttgaactacaacgcacaggctctgccccagtcacagttcttcctgctctgcttccccaaaactagaataggcctaatggacagctaggagatggacagctgcctatcttttgatggagggccaaagcctcttctttgagttttggttgagtgatgggctttctcaggaaagttctgagctgccattctttccatacaccacacccacaatgcagagtctgtgattccttatttctgtgtccttaaatggagtacttgtgaaacaatccaaatgcagaacccacgccaagtttttgtaaattggaggccctcctccgatctgctaatgtttgcccacatttaattcaatagtagactttctttagttgagcgacccatataaagcctttcttagttatggaagaattagcagctttctccccataagcacacactcatttttcaccaatttccataatgtgcactttatacatgtaatttatacataataaaatatcgaatacaactcccataagcaggtttggggataaaaccagatgactcatggtgtgagcagaagagcaaagatacactagagaagaacttaatagtattggacattaaaaatgccttgggcagggtcagtgtggtttaaaataagagcttccaggtctttccactcagagagttaaaagaccttttcctgccaatgcttatttagtataagctcaactgtatagcaaaactaaataaaaatagtgaagcaattaattttttaatgacatgaattaaaacaacattgaggggctcacagaggctaataatagaggccagtgtgatcagataaaaaagtgtcaagatagctgaggcaggttttaggtttagccgggtcttaaagaattgttgagtttttaaaacattaattgcagtaaaatacatgtaacttaggatgtactatttttaagtgtcccaattctgtgtggcaccaagtatcttcacaatgttgtgtaaccatcactactaaccatttccagaacttcttcatatcccaaacagaaactctacttattaaataataactgtccatcccccactgtactccctccccacaccttaataacctgttctactttctgtctctgtgaattagcctatcctatgtacgtcatataactggtatcacacaatatgcctttctgtctggcacatttgacctagcatactgtttgcaaggttcattcatgtgtggcatgtatagaatgttactttttttttgtggggggggggggctgtgtaatgttccattgtatgtatataccacattttatccaagttattggaccacattgggttttataagttattggaccacatttgggttgtttacaccttttggctatggtgaataatactgctgggaacattggtgtacaagtatgggtttgagtttctgctttcaattatataggttgaattttatactgctagtgatgagggagacatagcaagtacctgaagaggttataagccagaggcatttcttttattttgagctatcactgaaatcttgcattgttgactcttcgtaagtgtccgcttcctcctctatgctgtttgagagcgaaggccattttctaggttcagcacttaccaagtagctgggataagtatttactgaataaatagttcccggagttcctagcttaaagccgtcattccttatagtgctagttggtctccagagtgttgggttttgccacctatcctttttttgggttaattaattaacatgtgttcagggaacagaaaacaactcttaatattagccttagccaaacataatttgggaagtacatttgctaatgcaaaaagtcctggtgtaaataaaacacaattcaacaaacatttgttaagaacttgctgtctaccacgcacatttcaaaatttggaatttcagagcaatttcaaagctaagttggaatacctttttgaaaggcgttctcttaatacgaacctctactcttttaaaaaaaactttgtttttcaaaaattgtgagactactataacaatattaaagacaatttaaaaaagagaataaacattacagtcccaccctaataaaagccctattttcattttataatgtgagtttataaatcatttattttgaaaataaaaccctgaatacttctggtggcaattattttaattattttttaaaactctagaagtgaagcatgaactcatgatcttgaatttagagggcccttatttggagggatgcatggctgtttgacttgatgaagccaagcttttcttggtggagcagcagaattgacatgggtcatcttttggggatagatctgtagactgttgacatctgttatagggactgggtgtttaggagcctgtcctgtctttattctttcatatgttcaggattgaagaaaatgtttttattactgtgctagagggaaaagtacgatttaggatccttacctgcaggatctaagaccttggagtggatgtaggagatatggacacagttgaacatcagtacaaggcaaatgagtgatgggctgcctctgttggtgggatttagtgaggacaggttatcgcaacatggagtggctagggaacaacatccatgaagaggctgtcttcagcggggctttacacaagacaagatgtgtcccagggacacaggcagaagggatgatgggcatgacaacggatgaagaatgttctcaggatccttagccagtcagcctaaggagaggcaggttgggtccggggaaaacagctagaagttaaccccatggcagttcctttaaagttgtaagagctgctactgttagctgctgctgcctctgttgtggttttgaggctggggatggaattgttaaaaggatattgttttaggctgatggacctcagagttttgagggaggatgagttggggtggggtgggtggcggctggcggggagtcttttaggagaggatattacttctgtgaagtagttggctggtctcaagtggaacagcaggaatggaagggatacagggtgtgtggagggggctctgaaggaaagaatgctaggatgtgctgcccgagagggggaagtcaggtaggaacatgtttggcagatgatggaaactcttcccatacataggaagtgggtgagtccggactgatttggaaggccaataagaagttccatttctggaataagtgtgcctaacatttattatgtgttttccatgtaccaaaacatagttctaagagctttacataacagccttataaaataagtactgttagtatccccactttacagatgagaaactgagggcagagttgagtaggaacttgcctcagggttacacactcagtggcagagccaagatgcaagtctagacagtcctaactcaagagccaggctctcacttggtatgctaaaaggctttcctgcttttctatgatagcatgtattaaaaactatccagtcctgttttaatctccttacatgtgttacctcacttgattctcagaaaaactctatgagatgagggtatttttatcctcattttccaggtgtggaaacttggacacagagttagggtgatatgcctatgtcacacagctagacttagctgcattggcctggtgtgtctcaggaagtcaaggatgtttatttgactggattgtaattatctatatccatcagatcaacccatgagaaaatggaattgattgaaatagattgcagtataaattctttaagaaatattgggtcaaatttgctatcaatatcatgcacattcattgggaactgttcttttttaaaaggaataaataatataaataatagcatctctattgctgcctctgtttttattatttagtgctctgtacaactctgaaaataatcctggccactgcgtgcccatattcttgctgccacatttagatgctgcacctagcggactcaacgtctcactctgtagcctttatgacgttgttgctgcctaataatatttaatgcttataattggacttattgtcttttgatctggggtgtactttgcttgacataatggggctacagttgatgccaccacaggcaatatttggctaataaacaggaattgagactggtcatctatacacacacctgcaggaaacaatttccaccctcctgtaaagcaccttcagtctgtccctacccacaagtgctcttctttctatctcgcatgtgagggggtctcctgttttctttacctttaagcctggtttggctacagatctctatttctgtcttgtactgccagaactacccaagggagaggtctgcatttgcagcttgtagccctggagcaaacaacacttcccactcaattgaaattgtactttagaatttccagcagtctctttgtaaccagattaggggtcttttgttcattccctgccatcttactgtggcatctgcccttagagccaccaccctctctttgaaactttgtactgcattgccttctttgccacttagcctctctcccttttcttcctggtggttctttttcttaaatctctcatgaccctttcctacaccgtcttggctggaagagccctttaagatcaatgcttggttggttcctcaaacccttttctttaatgatctgatcgtgttttttaacttcacaaggtgtcactggaccaccatcatctgaattccaggtcataagcaacccactgctgagaagtcccattactggccaggttgtacctgtgagcaaattacacctctcacgtcccctcccctcagaatatgcccccatcccctatcctcacccatcctgaacttgtgtggctcactcagatcagtcctcatctgcaaccttgcatatggtggcaggggacataaatctgatgtgcatgaaccattcccttcaccattctgcaagaggtgactgggggccccagggaatcttgttatcacactgccccagcccacctcacctggggaccttgccttctgcctcctcactgaggtcttccctgagtcaaccttttgctttttcatcccgctgatatggccttcctctgacaatctatagtgtcttttcctgtttattctgaattccttactgtaggttctcattacttctgcctgcgaccagcatgtttcactcatttccttgaatctagttgattctctgggatctcactatgcatgtcacttctctgctgaaaaacctaaattgaatctacagggtccctgaggtacgttcccagaatttacacccagaagttcaggacccttgatggatctggtttcactccacgtagtttcacctgtcatgtgctccgcaaggtaccctgttttttagccaggctggtttctgaataactctagaggctctgtgctcacttcactgccagttcatgctgtcatcttctcctcctcctcctcctttgcccttatgatatggttacactccagcccacctcttgctttttcttcagattgacagtaaacctcatagctatgttttacttcagtactttgttctattgtttttagagagacagagtcttactctgtcactcaggctggagtgcagtgttgcaatcacagtttgctgcagcctcaacctcctgggcttaagtgatctcccacctcagcctcccgcctcagcctcccatgtagctgggaaaacaggttcccactaccatgcccagctaatgttttttctagtttttgtagatgtgttgggcggtgggggcgtctcactgcgttgcccaggctggtctcgaactcctaggctcaagcaatcttcccacctcagcctcccagagtgctgggattacaggcgtgagccacggcacctggccagcagtttgttctttaaaccctgaaatgtatgtgaggaccatgtgtcacactagcatggacttttccccagcatctagcatggtgcttttgtagatgataattaatgaataggtatttgaatacatggaggcatgcatggctgaatgaagtggctgttgtaaaatttctagggttcaggtttcatattcagagcctaaagtttgcatctttataaactaaatagtttcctatctaggaaacctatttaggcattagggtgttaaaacaggtgtatcattttctgccttagtgtttagagatttgtgaatagttctccttttgatgaacattgccatgtaaagagagttatacagaaataactgaattcacacagttttaaggaaaagctattctatgtcatggtcatgtatattctgccaaagagagtgacaggccagtagtttcttttttctttttccccatagtgtgagattttgtttctgttgtttctaagctgggtgtctgcatgtccacactgcgaagatggcccatattcagaatgaaaacttgacccaattgtatgtttagcccagagaaggctggggcattcagcacatcctggcttggggaccaaatgtgaccctcaggattaattgagggttggagaaaataattttatagatgaacttaagacattttagacagaactctcttttcagccataaatagcagggcagctttgtcctatttttattgtagagtacacagaagatggaactcagtattggaagaagtgctttatttcgccaaggaagaagatcatactcaacacgattctgtttttcttggcaggctcttctcaaccatctgtgagtccaggggaaccgtctccaccatccatccatccaggaaaatcagacttaatagtccgcgtgggcgacgagattaggctgttatgcactgatccgggctttgtcaaatggacttttgagatcctggatgaaacgaatgagaataagcagaatgaatggatcacggaaaaggcagaagccaccaacaccggcaaatacacgtgcaccaacaaacacggcttaagcaattccatttatgtgtttgttagaggtaaatgcttggctttctgcagtgctgtgctttcaagaatttaatatcctgctcttaattttggatgacatatggatgactgagccatagataaaatatttctggctgggtctagaaggcctaaaacacatgtttcttcactgttctctcccatcttttgatatgatacatagtggctttgggtatggccccagctggaggactgcaggactgtgatactcttcctaatgagattacagtaggtttagcccatttgtgctggtgctttgagtaaaccctgagaatcaattaggccctttggaaagctgcattttaatgccttgagatactagatactcccacttagtaaaaacacttcagggagccgaaggcctctcaaagcctaaccagaccgacacttcgaaagatgtggcccactcttaaggagtaaatttcagaaaaataatttggtcagctaaacatcccatgtctgtcatgggttctttgtagagttgtccatagaaaaaaatgtgacctcttataaacaaaagaaaaataaatatggtagttggagttctttgctttatttcctatgacaagttcagtgatttgtctgtgattttaatagccttttcaagagtaagcatgctgggcaggggtgtatcttgtagttgatgtaaaaactgatccactggcagcttaagggacatatccaagtgacgggaggagaaatagagttctattttctagttctgggtgcccctggactggggctgtctttgaaacaggcctgagaggccttatccatggtattgtgaatgaataatggatacttttattctagattggagatcttaggtacctcctgagttcagttcctcactacagtatttggataagatgatctgttctgtcttccttacgtaattgttagggagccaggatggtacaaattctaacatgctccatcaggagcgaataaagctgactctaaagtttgactgtgcctctccgctttatcagttgtcctttccgaagtaggtagctgcaaagagatataccctggtaagtcaccacttcgcctcagggcatgcttctgtgattgctgagctaatccatgtgctgttctttacattcaggaaggtattttgcaatttccaggtggcaatgaagtatcatgacaattgaataaatgaggaaaactgttgaattggttaaatcactctaacagggctcacaaacattcttcatagggaaagtcatcttctgtatcttggaactatccttaattataacaaatgtaagatgtttgaatacttaagtaatctctgttacagcaatgaaggaaggtggggcatcattgtaggagctagactcaagtgacctacaaagagtagataaaacagtaactagctatggcctgggaccatccatagttcaaccatcatgaggtcatttatttgcagaataaattagtaaggttgggagatgcataatttatcttggaaaacttttttttcaaaattgatcaaggataaaacacaaacctatttcaatgatgtcaagttcattttgtgaaacacctgagtttcagatggaaaggacagtttaaaaacagattttaaatgtaatctgtgggcctaaacatgtatctgtattatgacactgtagagagtggcagcatattgtgtatatcgaaattaggtttgtctggcttctatgaggccccagtcagcctgagccactccgagtctgttcctggtgtcctgtcataaacactaatggtgttcactttcactcacaagtgtcctggtgggctatggtatttgccacagaattcctgaaactcacaagctccccttgtgcatttgaaattatttgatttccagaagctacatttacatgtttcttcagaggaatatgaatcaagtgagactcacctatcatgggtactgggtggcctggtgagagttttctggattctctttagaagccgaaagactctggaccctggaaaggctgcaccaagtggttagaaggaggaagcctttcctgctctcactaggaatcatcacactggcttattggcagatgatccctggagttgtaataaagttttcccaaagttttaagagctcaaatattgctctctgttggacttgggtttgagttccaatcagccatttccaggtcatgtcactttaggagggttgcttttatgacaccgcagtttcatctatgaaatggcaataatgatagtactgatcatgggaggggcaatttgaagattaaatgagattaagtgtaatggtccaagcttagtgcgtgatacatggaaagcgtttaataaatgttaattctcaatagtactagatggataaattttgcttttgtttacacagaaaaaagcagccatttgggccactagtcatgaaaggcaacatattagatcttttaaaaagtgttttcagtgtctgtgaccagccattccaactactgattttggatatgcttctatagatcctgccaagcttttccttgttgaccgctccttgtatgggaaagaagacaacgacacgctggtccgctgtcctctcacagacccagaagtgaccaattattccctcaaggggtgccaggggaagcctcttcccaaggacttgaggtttattcctgaccccaaggcgggcatcatgatcaaaagtgtgaaacgcgcctaccatcggctctgtctgcattgttctgtggaccaggagggcaagtcagtgctgtcggaaaaattcatcctgaaagtgaggccaggtactggctctttcttatctgcctctgggagttgagaactcacttatctaaagaagacttctcttctcgttgatccaccttagtgtagtcaatcagggagctagctgttcatagttcccccagcttcaaaaaatgtcatctgcttttgaatttgtttatttcatggtcctgaccccgtgtggcagttccatgactgcctctcatagaggtgaatgtatctgccatagattggcatttagactggactgacttaagtcagcccaaagtttcataattgcatcaagtactcgttctaagggaaacccattgggtagcttgaattatgttggttgaaaagattagcatgcagatgattcattctttgatttactattgacatatgaattgactttcccttcagctgatcaattgcaatgcatcctcaaactgtttgagatctgagaaggaaaattccagttgactgtggaacttgttatggttgtgccgttatgtagaatatttcgttagctggaagataatctaggttttaaatctcagagatcatctaattcaacaccagttggcattcagctattgagtacagtttttattaaggcttttgaaaaagtatacttattgaaattagggaaaatttgattatttaaaacctgggatttccagaggtgagcagggtagggtttgcatgagaaagacgcctgtttgcttaaaagaatataagtagttgttggtcacatcctcctgacaccatcaaggttgtctgaaataaagattaaagcagcttctctatgctagggcttctacttggtttggaaaaagtgttttccagaagtattataatctcacagtgggcatttctgtctttttcactcaatttacttgaaggatgcttgatttaattgctggtaccttcagatatgcaagtagtacagataggttagcaccatgctttgtattttatttaaaagatgacaaagtaagctgtacacatttgaggagaaatggtaaatcaaaatttcatgctataatacaaattatttgaggggccacatttcttttcattctagccttcaaagctgtgcctgttgtgtctgtgtccaaagcaagctatcttcttagggaaggggaagaattcacagtgacgtgcacaataaaagatgtgtctagttctgtgtactcaacgtggaaaagagaaaacagtcaggtgagtgaatcgcttcattcttctcatgttctgtctctgtgggagatgataagttttctctttcagaagagtctgtcctgaaactgcctcgactagtgcgtctgtcagaggtggattgtctgggagagtgttgggattgcatatttccccctttcatacctccacatggagatatatacatttattattagtaacaaataaatttcattttatacatttattttgagaaacttgagagaacttcagattcatgttattacttcatgctgtttctttgaaaaactgttagggacttaaaaaacatggttaactgcatgaatactttgatttaaaactattgttgataccgtttaggccagactatttaaaatattgaaaagagttgccacttccatacttaaaaagaatagagagtctcaattattcaccagaaaacccttccctcgcccacaaattggcctatccatttgaagatgggtttctttttgtaaggatctgatttcctcctttgaggctggttacctgagattaagttgctaatggttttctatttgttttagtcactattaataaaactgttatccttaatctgaaacatctgggcatgcttacgttcccattcatttaacaaatgcatattcaatgccattatacctcagatactgggttaggcatatcttaaataaattttagctagttactgaaattttctccctactaaaagagcagagtttttacactgtcttaatttccaaatactttgctttaaacttcccattgaccaagttttcagtaatttttgtttgaataatcttggccatctagttaattagctatcacagtggtttttattcattacccatgcaagcattatattggaaaaaagaaatattatattttctttctcctcctcttcctcctcctgccccatgttcaacattggcaattttatgcctgtttaaaaaactctttgctaaacaaataaccatggtgattgccataatgcaaagacagtgtgatgatattcatgtagacctgtgatggatgatatcttgctaaatgaagcctgccattgactggtagaatggattgtaccatagacttattctttcaaaccaatgactcagagaaacattttagtttttgtatcatataatgtaatacaaaaatagcttatgtatggatttttggctaaccttacagaatacaatctcatattaattggctttctataatccttgatttcagatgagagaacaatttagactgggtgtgcatttgggcctctgtataacttgaacattatccttttttgagatgagaaattaaattgcccaggcagttttgttctgaaccatttttcccaggagccctgcatgccagtcccaattaatccactggtgctggtagataagccttcagtgttaggagctctttggggaaatcccagtgtgcacctccaagggttaaggaaaaccaaatcacgtgcaaacaatatgtaatgtgtgacttgcagatggggctcatggctgtctgccaaggttcatccatgaatcttttattgatatcttttggcttaatttagaatactattagcactatcaaattattaaaaaatccataatattttattctgaccctttggaataagtttaactcacaatgtaatttagggtaaaatgactttttagcattgttgccattgtttaagcgcaagggagtcttggagtttgttcaatactgttaatcttagttggttagctttcttaatgcctctaaaccctcacatttttacttgcttgtaatcagaatctttgacagtatcctaacttatgggctttgggtttggatgttcatgctgcatctcttatgactgcactattcctttcagcgctgacaagttcagagttcctgtttgagttctgttgtggactcttgggctcttgaaagaactcgaaggaagataccttaaattgagactttgatatgttatctgtccattgtcactctgcctttgtggagaagtctgtgaaactatgaactgggaaaagccagtttgaaaatgttgcttcaccttgctcttacatcttcttgacaattgatcttatgctgtgaaatggtagatttctgccaattattagaagactctcttagaagggggtagtaggaaatctacatagtgttacaaactagaaaagcctttaaagatagttttgttcccacatacccttttagaaactaaaagttaagactagtgatgctcttgacttacctaagatctcacgattagttaacggcaaagcaggtttctgttctttttagtttgaaacattcagcttcagcagtcaacttttgtgtgtggttactttaatgtaaaaatatttgtaaaaccttaataacattaaaaaataggtataattccaccgtcatagatagcaatgctgtgtaatagaaatacatgaaccttatatgtaattttaaattttctagtaggtacattacaaaaaataaaaaaggtaaaattgattttaataatatattttatttgactcagtgtgtctaaaatattatttcataatgtaattaacataaaaattactaattaggtgttttacatttttttaaatataagtcttcaaaatccaggacatattttatatttacaacacaacttactttggactaccagatttcaaatgcttagtagtcccaagtgtctagtccttataaatgctatatagtctgcattttttcatattttttctcttttcccctatgcatatgtattatcagataattgcaattttaaggtacattcaatttgtgctttttaagtaggtaaacacctctcttatagtcataatgctatacttgatatacatttaggtcgtttctgagtttttaccacaaccaacatattgaagcttttattttctgttgagcaatttccttgagttaaatttgctgcagttgatcagagggtatgaacatcctggtaagctcctttccagaaggatttttctgatttataatactgtcagatgctttaacttcattaggtttaccaaagcctcgccaaggaatcacccttgatctcattccatgtcaatattagctccttttactttaattggttgtttttttccccattgtaataggagtgtgtgtacattacagaaaatttggaagatgcagaaagctatattagacttcctttaatcttttcagaaagctgctgtagcttatgttatggtttccccatgactttttaaatacaagaaatctctccatgtcttgtctgcagacaaaaaatgagtgagatggtgatatcacaagggtaaattcacaaccttttcttttcagctcatgcttaaataatttgggccttgttcttagatgtctcttataccttggaactcccttcagtagtttacaagattctgctgggtgagaactgcaggatgagtttccaagctagttgttgacattgtgattctgttttcattcttgcaaataataaattttaataaaatagaacattattgttattagcaatgtgttcgctctcagtcattgggacatagaagagaaaaagacatgacaaaaatatgctgactcatattacaaaatatcagtatcccataatatttcagagatagcaacttttaaaatttagcgttgtatagaatttggaattatacatactagggttaagaaatgaattttcgtttttttcccaatcgttaataatgactgtctttcaacataatcctgtaatatgaagtgttccaatgacagacttgtcatgatgctttattattcttacttaagtagtgtataatgaaagttaatatggagaagttaattgctgctatttttaatttatctaggaaagattctgaatataaattatatggtaatcttcatttttttttctccttttctgaaaccagcagactaaactacaggagaaatataatagctggcatcacggtgacttcaattatgaacgtcaggcaacgttgactatcagttcagcgagagttaatgattctggagtgttcatgtgttatgccaataatacttttggatcagcaaatgtcacaacaaccttggaagtagtaggtaaatacctctatgggaatgtttaaattactggcagtagtgaaagaagaaattattagacagtttcttttttatgtaaatggaatgttgaacagattcttagaattttgttatcactgaatgaatgaaaattatccttgtagcctcttgcaatgaaagcacaaaaccaaattctaccagtttagtggaggaaagtggaaagctgttactaaaattgttcaaacctattattctttgtgcacctcaccctcctttccccaccaaacaaaacataagttgagatttttcaaaaatgctagtgctcgctgaatgacttgagtttggaaatggatgtagaatttatcaaggaacacaaatgcttagagcctgaagtatttctctgaaacttttggtaggggctgtgccccttggtttattgttttgccactcatcagatctagttccttctagtaaggactgaattggacttttcctccctagtattccctacctccttatctcacctgttctctaagcataaagattatagcataaaccttcaggaaggagtgccattgggacacaggtcattggttctacggagcataaactacaacatggtaatctgtccccggaccccatcatatctggtatgcacaattggttcagccttatcttctctactctagaaatttcactaaatatttattttccaagcatctttatttaaagagagcagagcatagtgagtttcttcatgcttttgatttactgagaataataataattttaaaattactttgtttacaatttttttgtcttttgagtattgtttgaatttaatccatttttctgtctttttagtacaaccatattcctagtgttagactttcattaaatacttctaaggtggcaaaattcttgatcaagaacaataataaagtgatgtggtatttgttttcatctctttccccgcctcaccaaatttcttcaataatttatgtagcagtattaaagctttgtgattatcccacaataatctcgtaaaattttggcgtttctgcccatgttataatggaaagtttctccccagactgaacatggaaaagatactttacttgcaattatagtcagcacacagaaagtgtactactttgttcctaaacatgattgtgaaccatttattaatttgaatagaaggctatgcttttaaaatattaaactccataagcactaatttgctaagttgattagggagcatgttgatatatcagcttcagctccagaaagcaattagtaaggatgttttgagaacattgttgtatgtaatcggatttttaaaatccattcatcaatttccaagaattatcactgtatgactggaaggacttgtggctgtgaaatctgaatctggttttgtattgttttgagaatgggttgaggtggaacaggaacaggaggagacaaacagaaaagtaattttttagtggctgggaggagggtttggatccatgatggagtgatgaagagaacagggctttggtatcactctttttttaagaaattacttttttattgtatatttttaagatatacaacatgatgttatggggtacatatagatagtaagaatattactatagtgaagcaaattaatgtattcatcatctcacaaagttaccctttctttgttttttgttttgtgataagagctgttaacattttacctggttttgaattggaggctctgcctgtaatcccagcactttgggaggctgaggcgggcagatctcttaagcccaggagtttgaaaccagcctgagcaacatggtgaaaccccatttctacaaaaaatacaaaaatgagccgggcatggtgccacatgcttgagttgcagctacttgggaggctgaggcaggaggattgcttgagcccaggaagtcgaggctttagtgagctgtgatcgtgccactgtgctccagcctgggcaacagagggataccctgtttcaaacaaaacaaaacaaaagattaagtgtcacaattattaagtaaaaggtatgctaaagtacttaaagcagttcttaacacatagtaagcacataaatggtggccataaaaataatgttagcaattactttattgctctctttttcaagatcttttttatattattatatcaccttttctaaggactccattatttatttaaccggttttctattttgccattttatattataatagcttataatagtgtaaatagcacttttgtttttggcctgtagctatctatctcattttaagaagagttctcaaatggaaattacaagatttaatcaaggaatagataatttaaaaaaaaatctatattgctaaatgcttcctaaaagaattgtgccaatttacagtgtgtaattcagcatactacttttaccacacttgcaaaattattgagtttagttaaaattagttttgctatttttaataagtgaaaagtgatgtcttattttaattactagtttagctaaacattttttctacattttattctcctttttcctgttacattaattattttactatatagacttttaaaaatatttatggatttaaatttgtcttctatgatgtttttcttctgttgcttctaaaaagcctagaaacttcccctctgtagaaatttcataggagtcaattgttatttagttaaaaataacattttattgttaaaatgctctttgatttatctgtgatatataagaagacctaaggttatttttcttcaaatactaaagaacattctttgaacatttttattaaacattagggctctcttgttttcccttaatttatgacaccttatcacatatataattatatattgggtctgtgtatgaactcactatttattccaaattcttttaacctaaaaaacatcaagactagtagatttagaagacttttaagatggtgatagatctttaagagaattgcttaagaggcagagatgggagaatcagtatttcaaatgtgtgtcctttctcacttgtgacagtgattctacaagagcaaaataaaatgaaaacagctagttaaaattctcttattgccaattaatactggaaatcaaccaattgtttttgtaattccaagatgaggttctgtttttttgtccagtagttgtagataatggtttctttctgtcttatttcattctaattagataaaggattcattaatatcttccccatgataaacactacagtatttgtaaacgatggagaaaatgtagatttgattgttgaatatgaagcattccccaaacctgaacaccagcagtggatctatatgaacagaaccttcactgataaatgggaagattatcccaagtctgagaatgaaagtaatatcaggtaagaaatggaccttgccctgggggattacacattacccccttttccagtgggcttatcagatcttatttctgtaacccgtaaatccacgagaagatacctggtaaagaagaaagtctggggctgcctcctatgtcctcatcctagtattccattttgttgtgtgtttagagcatgcacactcttgcacacgcatgcacacacacacctgtgtgcctcagttttctcacttgtaaaatggaggacagttttctagagatctgagcttagctcaaagcagtaactttcatgtactcgggatacagcaagtctcttcagagaaaaagggaagttagtacctataattgtttcttaaagctgtaagaaaactaagagccaaataacttcgcttcaggcagtgaacccatgttcttttacactagacctctcatttgatcctcaaaacattatagtaaaaatagtagcaatagtaatacttcaggtaagacataagtgctttttttctgaagcatggttctaagtactttacgtgtattcacccactgacctgaagcctcacagactttgtgagtagacattcttatttcccaccatttttatagaagaggagacaggtacagaggggtgaagtaatttgaccaagaccgaacggctaataagggctaagtgcctggatagggttttgctctatttttccagtcaggactgttgactgttggaaaaatatgggtgagagatgatagcgtcctgggccaaggactaaaggttggagggaagaggataaatttgggaggtctccaggtgattgagagggcaggagaggcagggaggagttgaagatgcctttaggttgggtggtgagagaccataccattcagggagagcaggaggacggggagggacaagtttctgaggaaagacagtgactttgttttggggtttgttggatttgagattgatagtgggatcttgagtgggattgtttaggtaggaagtatcttttgccaaacgccctagaagcagagcctgagacagggattctgaggcaagtgacttatgcagggatagactgaccagggagtaggggaagaggcatgggagggaaaggaggcaagtaaggatgtggctcagatgaccccaagcctcagtcttatccaggagctgagcggggcttttgcacctctccagctatcagtcacttactggcttcagacctggctgcacggtcaacgtcttccaaggattgcgcaagggcaatccttgggagaatgctgcaggcaagtgtttgggggcatgaaagtagctctgtagaggagacatggtacagagaaccctgcgctggaagtaaagacgtgaaggttgtgagccagcagccagcagctcagtgtgagagagtgggctgcccagggagcttgcatagtgtgagagttggcacaccgcctatggcaagttggtgttgtggcccatgtggatcatgtgggtcgtgggctgcccagggtgacacatgtacatcggagcccctgccagtaaccccgacagggttgtagggtgctcagtgtacacagccctatatggcggtcctgcaagaagtcagaagcttgagtggcaaatactgccaggagcactgagaagtctccggggtggaggaaaaccaggagatgggggtgttgcaagaaggaaggtgagcagtgtggacctcgctgagggcccagagtgtctgtgtgagggcagtgagcatgtgcatgcagggcaggtgagttcaggacactgtggagagcaggctcctgcagcaccatgggcaggggaggaagtggtatggggacagcccagggtggtggggggagggcggaggcgggaggcggtgggccagtggagaggctgcagcctctgtcaggttgcctttgtgcttaacctttccccactctgtggtctctcacaacaggcgttggtcccagatggaatatgtgtgtgcgtgtttatgtatttgttaatgtggattttgctaatacttactgaattaaatgagttatatttttcctcaaacaggcatagatttccaggtagaaactgaaaaagacatgccttccaaggcatgctatccacaggtgattgactagttgtcttttctttgtagatacgtaagtgaacttcatctaacgagattaaaaggcaccgaaggaggcacttacacattcctagtgtccaattctgacgtcaatgctgccatagcatttaatgtttatgtgaatagtaagtaacatgaagggctccttttaattttttattcttttaaagttgtggctcgtgtttgtaacagctgcaaggactcaacttgtgtactatgtaaataacgtttcatgataatcttgaccttcacagagacttcgtggtttggtggttagagtgtgtcaaaaaaccagttccttgtcctacatttcactgatcacatgaccttgtagaagttgctcaaattctgcgtgctgcctttgaagtaaacagaggagccaaacaagttgaacatacagttgtttgagggaaaatgtattattattgattgttggaatggggggctagtggttgaataggagctgaattactgcgttaggtagggaagagatgctatcgagccctgacgtgatttctttgttcagtgctgtctcttttgaggctgtgatgttacttgtgtttagattgttcttccactgagacaaatgcaatactgacaggcccatggctcactactgagtaccatgtggtatgtgggagaaggtagcagatggtttaggatgggagatggccatgggcacctgagcacccaagtcctgcactgctggggtcctaccgaccccactcctgcagcccaccatgtcttagagaaatgtctgctctgaagttgaggccaagggagcccgatcatgagctggaccttttgccaagtgcagggcttcttcctggctccactctgggccccgtgtgcatttccaaggaaggtgcctcccacaccatacctgctagtgcaagggaggcccctaaagactaggagttccaagggagtggcccaataaatgactattggaattggctttcctgggtgtgtggaggatgaggagacaactggaatatttcatagaaaagagcttaggcgttatgctgggcactttatgtgtgttgggttatagggtgttgtgggaacaaaggactggggccaattccttgtcttgaaggagcttactttctgtacgaggtgttgtggttttgtttttttttgtttttgagacagagtctctcactctctctccctgtctggagtgcagtgacatgatctcgattcactgcaacctccacctcccaggttcaagtgattctcctgccacagcctcttgagtatctgggactataggcatcccaccacacccagctgatttctgtatttttagtagagatgggtttcaccatgttggccaggatggtcttgaactcctgaccacaagtgatcacctgcttcagcctcccaaagtgctgggattataggcatgagccaccgcgcccagctagatgttttgtttgtttgattttgagacaaacatgtttttgttttcaaacatgttgacaaacatgttgagccagcatctgtctctgtcacccaggctggagtgatcatagctcactatatccttgtactcctaggcccaagagatccttccgcttcagcttaccaagtagctgggagtacaggcatgcaccaccacgcacagctaatttttaaatgttttttagagatgggggtcttgctttgttgcctagactggtcttgaattcctggactaaagcgatccttctgccttgtcctcccaaagcactgggattacaggagtgagccacaacactcaacctgtgtgaagtgattttacataattgtcttatttgatgctacagctcaggaaagatggtagggtgggtggtgtaagccaatgaaaagaaatagctggacagattttttattgctaatccagagtcttttgactatgaacatttcaaaaattgtgttttctgaataagacattcatatgagtttagatgaagaaggtcacattcgtgtaattaaacacatatctttattactggccttcccagaatcctaatatgctaatgtgactttgccagagggggccatgggataggatgtatatatcccaaactcgtttgatcacacagttctcccttttcaagggaaacatcaagtattatctgagtcccagcaaacagttttgattacatagcatttctctggtcctcaattcaagtatctctagattaatttcaatgtgaatcagaaagtaatagtatatagaggctggacgcggtggctcacgcctgtaatcccagcactttgggaggccgaagcaggtggataacctgaggttgggagttcgagaccagcctggccaacatggtgaaaccccttctctactaaaaatagaaaaattcagctggttgcgatgatgagtgcgtgtaatcccagctagttgggaggctgaggcaggagaatcacttgaacctcaacctgggagacagaggttgcagtgagctgagatctcactgttgcactccagcctgggcgacagaacgagagtccgtctcaaaaaaaaaaaaaaaaaagataatagtatatagagcttagtgtattacccatggacaaaattacctgcttctgaaaagtcttaatgttcatctcatttaagagatgaccgtaggtaaatcggtatccttgcaagcataatatgcatattgttcatacagaattttattgtggctgctcttgtgtgatgcttctcaacctttctatgttaaaagacttccttttctaagattcccaatacattgtggatcaatacttcttgtaaaatatagtaaaaaccaattactggaaaagtgaaatgaaaaagaacaatatacaaaatacaagctcgggtttttttattttttagattcaatagatataacaattactctttgtcaaattgctcctcctcagtgcttcttctcagtttctgtatttatctcctgtgcaccagcaacagcagatcgtgggtggggcccactccacagacctcactttgagagttcagtggttgggaattttatgaagtgaggtactttgtgttaccactgtttccctggctttaagtccaaaggggtgtttaaatgtgtctcttttcttcttttttcatgcttccatttgccagtgtgtggtctgccagttggtcatgagatattgacctcaggaagatgtttctgacttttctctggtgggggcaaaattgctactaggctaatttgccattccagcaggctcagttttaatcagtgctgctggtgaacccatgcttatttgaaactagataggatatgttgttagccttccaaaaggatatcttcttggattgcctgtaagtaggaggtcttttctgcattctagggtatgggtctctaatacccacccagcacttcctgaggtcccactgtatttcactggatatacagatgaggatcatgttggtcctgacctcaagctcttcagaaagtcttttccttgaagttagtttgttacaaataacaaactgacaaaggcatttatttcacttacctaacacgttggatttattgatttgcaaacgtttggacagaggtagtagcatttatgtttgagctttaaactgtctatgaggtacgtcccagttgctctttagagatatagttagctgatttgttgattttttttaattgaaaaaaaatctagttaacattattatgtggtagtatttttaaaaattttatttcaatagtttttggggaacagatgggttttagttacatagataagttcttttatggtgatttctgagattttggtgcacctgtcacccaagcagtgtacactatacccgtgtatagtctttatccctcacccccctcccacccttcttcctaggtccccaaagttcattctgtcattctcatgattttgcatcctcattgcttagctcatgaggtaggatttttttcatgttaaattttaaaatcaaaagctaaaataattctacaattttaaacttagaatagttgtggcctttttgacatcattttagctgagccagttacatatgtaggtgtactgtatggtttattttgtaaataagctgagcctcaaggacaaaagggattgtgttctgcaaaaatcagaattgataaaaatcagaataatgaatgcatagtgtttgttagtgcagaaattcagcctacttttactctgtgacactaatgcgtaattgcttaatagattcatctgcaagaaatgctattgaaaatccttgatttggcatggttaaatatttggcggttgaaaaatctatttgttttgaaaattccacatgtaaatttcagtatagtgaatgtggggaaggggcatgttttaattgcttatatggtagacttttaaaaaatattgtgctctgacaatttgtgttaagaaaacacgtatataacatgttaagcttgaaaatgttctaatactgtttctaacctctctaatcaagccatgatttacatgggcctattaaactgactcagtgacatttaaggtggtttataatggccaagagccattataacatggttgccatctttgagtagaacttctagtggaaactgataggaattttcattaaaaaacaaagcaaaaccaaaaattagtgattatatctgcattgaatttgcattactctaattaacttttggaattgcttatccaagatgtgtatggacatcaaattcttagatctgaaatgtttgatatccttcagcgaaaatggtgatttgtttttcttggaaatgaaaatcaggaaaaaagtagagttttgaaaccttacctcaaagtgctttcttaatagacattaacctttccaaaactcttggaaatattagaaaaaaatgacattgccaagatgctatgggtagcttatgctacttatttaggaactgatggcctctttggttatattaaatgtcacacaatgaggttttttttgccagatccaggacaaataaaaggccaaatatgcactttaatcctaatatatccatttggcttttttccccactccatctagtatttcttgaataaataacaaactttatagtggacttaaaggataatcagtaaagtaaatattttgtaggtttattttggcttcaattttaaatacccatgtgaatcctgaaataatttacataattgtagaaataaattatggttgatatgataaaccagttgtttttccaacctttgggataattttaagaagatcctgtaaccttaaagtggatagttcaaaacatgatctggtagcatttccagggcggtattatgcatttaaaatatgtggcaaatggtatttacggatcataaatagatcccgctcccattttgaaagcttatcctttaatgacgagcttcagccagtgcggtgggagtactgtgatcctcacgtggtggtgacggggaggcagacattgagaactgaagggctccctttgatcattagccttacataggatgcctttaatgttgagctagattggaagcccaagtgactgctgaagtgcaccaaattaactcagaagtcaccaatttcactccatttatggaagggtattaacagggggttgagaaacaatttaaggaaatgttaaataatgtattatttccaaatcactgcatcatataattaacatcctacctgttgttagcaattatttataggtcatacagtataccaaaatcagccaaagcaataaatcacccagaataaggcttctcgatgagaaagatcccctttgaccaagtatgcaaagtctgggctaccttttagtatttttggttcacagttaaatccagttatggatggtggaaccaattctagggagaagctcctgcagataaagcacatagccatctagcttttggccagccaaccagaaatgatcccaggtagactatcagtgcatttgtgttgctgttaaaaaaaaaaaaaaaaatgcccggggctgggtgatttataaagaaaagagatttatttggctcacatttctgcaggctgtaagaaacacctgcttctggtgagggcttcaggaagcttccactcatggtggaagcggaaggggaacaggcatcacatggcaagagaggaggaaagagagagaggagaagaagggtgccaggttgtttttaaaaatcggatctcgagggagctaatagtgtgaggagtcactcattacctctagtacagcaccaggctaatcatgaaagatctgtccccatgacccagacacctcccatcaggccccacctccagtattcaggatcagtttttaaacatgagatttgaaggggacaaatattcaaactgtatcatagacccgtgaaagccagccatatagatggcttcacctgtttgccagctctctgggtcacccacctggctggaatctccaactacctttatccagagtaaaataataacggcagtcttgcctgcaaggactgctcagatctggtccttaaggccactgtgcccttcaggaagatcctcacaaaacagagcaaagttactagaacttcaacttttttggaagatggcaatgtcttcccaccacttaacctattagctttttctttccattttttaaaaaaatagtaggacctttcaaacacatgcgcgtccaaaccatacttgtgttagaggccacaaatttgaagacttgctgttaatttttgcttgaaagtctttgcttttcagtgttttccccattaggtggatactattagcgtgacttcctcttatagtaaataattgtaaattttaaacgttaaataaagtgccgaatagaactcctttctgatttatttacttgcttttgagagtttgctctaaggctgcaacagtaactggaacatagcttcgtttgtgtgaacatttgtatgctgcatgtttttaaattaaaacaattttttctcattacaaaagcattatgtgaagggtagaacaattagaaaatgtaaataagcaaaaataaaaatcaagttttatttttactttttatgtttatttactttttataggttaccattactaatattctttattatacattcctccagaccattaatttttttttaaataaaaatgaagtcatattgctttataacctggatttttggtgctgcacaacaaaagcattgtgaatatctttctataacatcattttggcatctcagtgtatggatcttttataatttctctagcccatgcctgatgcaattttgagacatccaggagcgaggcgggactctgaaatgatgtgactgaattttaaaagaaacctgtcagatgattatttaaagtttataattatcgtgtttaatgtctaatgagtgaccttgcttaagtggctggaagttaataaggttatcatctgttgttatctttcatgctctgtgtcttcaacatacgatatggcagatatactgtgctggctttcaggacagttctaaattaaggaataattttcagatcttcttagtgtggtagctaatctatgtaaaaatcgttgcttgtcttttcacattaatctttttatagataatatgtgttcatttgagatatctgacagtgtttgaactctgtttgtattttctgttcctgaacttgaaatgagtttttgttctcaaattgcttgggaattatgaatgttgtttttgatgtgacactctaatatctctttctccttataaagagaatgtctgtggaggcaagaattgttatagatgtttaaattggaaaaaaaaagatataatggcaacctacttttaaagtagaacttgattctcttctgttctgaaaaaatttagcagatgtagctctgaactaagctaaacatctttccctcctcaaaggctggcatcattactcttcctccctatctcataagaaagttggtctggtggatgtgttgctaatttaggggccttgatgtaaacactgaacctgtaagagaaccaggtaaactctctggatccatagcccttggttgcccccgtttgtgtggtttggccatttttttatgttgatggtggaaaagcaggagaaacaggtttaggtatgtagccatgtaaacttctgctggaattgactctaaacttgggtacatagacttcgctaaaagcagtgagtggtcccttttatattgtggaacttccactctgtggagattttcttttcagttgagccacttgtttttacatcaaattagcttccttcatttacagatatatgcaaggtcacctgtaatgtagtgaaatttaaattaatccaagaatagggacataatgtttccatgggcattctgtcaatacccttctcctccacttctgaattatgttgcaaaatgaattagctacttttccagagtaggaaaaaagaggcttttgtcccatgcctgcactccttggcagcaagcagagtggcattgtgatgtgtgtacaggtcttcctccccacggctgggtgatacagcaatggtgctcctgtaagttgagcagtgattctggctgaagaagtctctctccaagtagtttcatcatttttcaacgtaatctcgtgattgggatatctttttgattgctgtttagaacaggggttggtagaactatagcctgctgccagaattggcctgtagcctgtttttgttttgttttgttttttgcttttgagacagagtcttgttccgtcgcctaagctgtagtgcagtggcacaatcttggctcactgcaacctccacttcccaggttcaagcagttctcctgcctcagcctcccgagtagctggtattacaggcacctgccaccatgcctggcttatttttgtatttttagtagagatgggatttcaccatgttggccaggctggtctttctcctgccttggcctcccaaagtgctgggattacaagcgtgagccgctgcacccggcctataacctgtttttgaatggctcacaaactaagaacgttattgaatttatttctgattagttttaaaaaatcaggagatttcatgagacatgagaatacaactcaaatgttagtgtccacaaggaaagttttattgaaaacagccatgcctatttgattatataatgtctatgggcacatttgtactacagctgcagagttgagttgcaggaaagaccttatggcccacaaatctaaaatatttacctgaaatatgtatctcgccctttatagtaaaagtttgctgagccctagttgagaaaatcacttcattaagagaatgattttttttctttttaaaatgacagtcactgttaaaataaataggtacaggagattatagttgaagttttattttgtttgttaaataaacttctgttagtgtccatatgccaatttctggatatctttaagaatgtataagacacagtatatgtccaaaatatctatcctgggaattttttaaaaagtataatattccttttataagtaaggttatttttctactccaattttagctgacttaaatttctttattataatggtattatggcacaagtgtaggttttacacagaccaaaaccgggatagtgaaaaattccggaaaagcattgcttcattgcctttaaacaccagcaaacctcgaattttaaaaacagaaattcattcttatgatccctcttcatttagtcttttattatttggagacttaagtgtttgcgttttttgtcctgctgattataaaatatgggcaaatgtgcatttatagcggaagttggttaaagtggctgggtgagagaactctaatcaaaaaatgcctccctgcatttagatgaagaaaggaagaccccttctaccattggcttgtgtattgcctttcagccaccagccctcagctttgttatctgtactatgttcttaaaattcattttgttcttgctttccacatggactggatggtgatgaaaaggaatattttccaagatcacaaatctgtggggtaaatcactggatgtgtaggatttttaattgcatgagcaataaattctcagcagagttacaagcatctgaaatctgcctacaagctgatcggtgttgttggcgatatcagaatgactcaggtccatgatgtttttaaaggcaaaaaggctattttttttttatctccacaggaaatgcataacttatacacctcttaggcttatctaaacctccaacttgggaggaattagagaatgtgtcatttgctatactgcttattgcagaatatctaagaagccacagctcagatttaacctggagaactgcagagttatgtatctttaaaggcaagatgtatatttaatgccaaacacggtgcattgaggcacttataaaatgcagatgagcccagattttcatttttaggaattagatttccacctggctcattctttatgcattaaacattttcataatgcaacttgccaggtacagctcatgctgtactagtgtgtctcatccttttcagaaggaggtctcttagcaccagtgttagggaaagggctggaccgaggtgaggcaagaaaggcacctagagtgtgaaatataaggaggtgctctcacagatacccactcataggccctttagggttagtgccttcttatttttatgccctgggtgcttctcttgccttactcttgtcctggctttgataagggttccttaaaggccctttaaaaaggtacattgctgggttataccctcagcttactagatctctggaggtgcggcccaggaatgtgcatttattctcttcccttagagagtctaaggcatattgaagatttaggaccctgtcagcttggttggccaacctaaggccagcaggacaaaagctgctcaattagcctcaggttatgacccacctgggatagaaacttaacaaaactgcttaattaaccggcaatgggaacaagtaggccagccagaccacaccgttgccagccatggctgttgtataactgctaccaggtgtcacgctagaaggcttggatgttagagcatacttgtaaccaaagctaaatggaattgattatgtaattttgagctgttccaattttttaattaaacaatgttttataggttcactttcagctacccattcattgcaaaataaaattagaaataaaagaataaaatagaaacttttcatcaccttactacccagagataaccattgttaacatcatcttaaagtgttctttcagcctttcctccgcctattaagttaatatttaatttcactaagaatttaccatgtagtgttatgagcattaggaagtatgagtattaagggaatataggtatgagtacatctatgttgtgaacttagctcctatttgagtcctattcagttatctctaccatctttgtgtagactggtcccactcatcattcatctcagtgttataaaaaattcatgttgtcaggcgcttggatttcttatctcatggccctccattgcaaaaataatagaaatagtgccgtatttacgaaagtcaccattaggctgttcccacaggtctcttcttgtgactctataattgaatgcctttggaatcttagagacttgttcctttgggtgggatcttcatcatacaacagtgcttactgtgtgcctgctgtgggtctcactgagctaggagtcacaagtatactcaatcagtaagatgtcgtttctgccctcgagaacatcgagtctgatggaggaggcagaccaagatcttgcataccagcgtcaggtgttcttaaatgctttgggaataaggaaaggagagagaccagcttggcatcagagagtttaggcttgcttagaaaaggaggtgacacttaaactgagtccagagagacccacagtatggcacctagagtccctagcaaatagcactctcctaagggtctgctgatttcttgtgtcgtgtcctacttttcagcctgatcacacagttgcccatgataattaaatgaaacttgccagatggatgctttcgcaagacgatggcttgtcttcttgctctatttgtaaagctggcattggatccaaactctcaaggatgcccctaccttgagattgttttggagagtttctcttttgtgtatattagccaaatggcctgctcatcagcagggccaggttgagtgacaggtgggtgtgtcatgcatgtggatactctgatctccgccaactccagggaggtgcctccagggaggtgaggtgctgagaggttattctacaaagatgtcatttatcagtgttaccttcctttggggaaataaacttcctaagtttctgatctgtcagtctttccttctcactgcatatattttccctatcagttgcaatataattgatgttgaattccctgcgcattgggttaaaatatacaccttatcagactattctaaagaaggaatttttagattattgaggagaatatttagagtggcaaatacagttcacttcatttgtagtgaaattggttatccaagaaaggtagatattctgattataaaataataactcagtattaatagtaataataaattttattgagatggagtcccactctgtcacccaggctggagtgcagtggtgctcactgcaacctctgcctcctgggttcaagccatcctcctgcctcagcctaccgagtagctgggactacaggcgcatgtcactgtgcccagctaatttttgtgtttttagtagagatgcggtttcactgtgttgcccaggctagtctcaaactcctgacctcaggtgatccactgcctcagcctcagcctcccaaagtgctgggattataggcttgagccaccgtgcccagcaataataataataaataattgtttcatttctataagtcattcttagctctctgtatgtgccatctcatttaattgtctcaatatccctatgagaggggcacagttattattcccattttacacatgagggaacaaaaatttagagagatgtagaaacttactcaagttcaaagaactgagaaatgtaagagctggtattcagatgtgtccactatgcatggggctcccgtaattctgtgcttagacttggcacaatcaatgctattcttccgagtacagggtgagcatatcagcatccctgccatcctgttgcttctgttgagcttatttattcttagagggttggaatccttcagatgtattgccatcagaaccaccgagtataagtgcatcttcctttcactttgtaaataacttcaaaaattagaaattcttgagtgttagctggttattgtagttacatagaaataccaaattagagcatttctgctgttacagtgaatatattcagatttatatatatatttatatatatatgtatttatatatatttatatatatttttatatatatgtatatatatttatatatatgtatttatatatatatattcacgttcataatatacataaatatataaatcttaggctggttttcttttctagttttctgttcatattttgcatttgaaacaaagatttgaagtaaagcccatattgtattttactctttatgttctagcttccctgtaaatagagtgattcggcttttaatcggcaccacccttccacccccaaaaaggagaaaattcatgtaagagcaaaagagtggggcttatcttttcctctaacaactcctaatttcatccattccagttcccacaataacttgaaattcctagggcaggtacagttgcttgaaatcccattggcaggaatcctttaaagtagatttttacctgtggaacactttggagtcctagagtttgattagaagcagtcttcagatccctactccctgaaagcagaaaccctgcagttggccctgccacctctgcctcagccatctcctctggggctgggccactgtggctgggaaagcctttctgggttggaccctgacagccgcctccttgtaccttccactccttggttcagattctgccctttgaacttgctccctcaggctactcagcagcctcaggaaggttgtagggattagagagggagtgaagtgaatgttgctgaggttttccagcactctgacatatggccatttctgttttcctgtagcaaaaccagaaatcctgacttacgacaggctcgtgaatggcatgctccaatgtgtggcagcaggattcccagagcccacaatagattggtatttttgtccaggaactgagcagaggtgagatgattatttttggcactgcttataatgcagaggggaaggactgcaattcacttgaatttcaaatatgttttctgattttttttaaaaaagctttgttttgattattgttttttttctagccatgtggctttttagaagggataattgctatatttttcttggtagacattaattttgtttgctgaaaaatcattactgaatgacttctctattttggtgttatctttctggatttatcatgcaatttctagcctgcaggtagataaagcaattttgcaggacagagtaattagatttccattctatacacaggaggtaatgtgtgtgggaaatgtgactgtagttatcatgaaaaaattacctcagtagttaattgccaagttaccaaaaagtaatgatcgcacaattacaacatacatatggcatttgcaagcgaccgcttttaaaaagggtttcttcttgataatgtgcccagcccctgaacagagaacatctggcactgtgctgcttgcccctcaccatccacacttaagccttaaattgcccttttgcattacctgaagacgaaaatggggtcaccacagctgtttttatccatcaattgctattttatgctcaggctttaaaagcccaggttaacatcacaattgaatagttagtatggtcgcagaaattttatttttcatggaataagcctctttatcacaacaagttggaaggggttacatcggattgctgttttcagctggggtttaggagagtgttttcttttggggaatactaagtagggttcaaggcccctgggaggaatggccacagcagaagcaagccctgtagttacaggcattcattcagtagatacacagggagtggcaagtgtgtaccagacactattctaatggacagaacacacccaagtctttttgcctttatgagtttatgttctagtgcaggggtgttcagtcttttagcttccctgggctacactggaagaagacgactgtcttaggccacacataaaatatagtaacactaacgatagctgatgagctaaaaaaaaaaaaaattgcaaaaaaatctcataatgttttaagcttcatgaatttgtgttgggtcgcattcaaagccgtcctgggccacatgtgggctgcaggttggataagcttgttctagtgggtagaaacacataatagatggaataaacaatgaatgtatgtaggtgttaagaaaggaaacagggaatagctaggtgtttagaatagggaagtcggggtctggctcatgaaaaggatcccttgcagtggtggtctcagccacctgcagtataactaggccttcctgcttagaactcaaacttcagtcctcactttgactattttctggtctacatccttgattttgttgttgttgttgttgttgagaccgagtctcactctcttgcccaggctggagtgcaatggagtgatcttggctcactgcaacctctgcctccagggttcaagtgattctcctgcctcagcctcccgagtagctgggattacaggcgcctgccaccacgcccagctaatttttgtatttttagtagagacgaggtttcaccatgttggccagtctggtcttgaactcctgacctcaggtgatctgcccacctcggcctcctaaagtgctgagattacaggtgtgagctactgcgcccggccccttgaagattttttatgctttcctcctctatgctatttcttttcaaccattcgtgtacccttttgaagcttgtttattttagggatctactgtgtaccagcatatatgcctgccattttattgaattcctttccaatcctttcagtaaccctctgcaatgggtattactatccctgttttacagtcgtagaaactcagtgttggtgggggttaaaaactcatcaggattcaaacccgcatctgactccgaagcctcctctgccttctcttccccagtgcttttttcactcactaggtcaccaaagtgcttattcttagacacttgtaaaaggacattttctgttgattatgaacctctaactttgttttaaaagtatgccacatcccaagtgttttatgtatttatttattttcctagagtaagccagggcttttgttttcttccctttagatgctctgcttctgtactgccagtggatgtgcagacactaaactcatctgggccaccgtttggaaagctagtggttcagagttctatagattctagtgcattcaagcacaatggcacggttgaatgtaaggcttacaacgatgtgggcaagacttctgcctattttaactttgcatttaaaggtaacaacaaaggtatatttctttttaatccaatttaaggggatgtttaggctctgtctaccatatcagtcatgattttaagttcattccaacattgaccatgtcatttctggtaatacatgcatcacaccatactgtcatcaaactcactaagtttcattttgtactagcttgttaagtatatgcttttaccagagcaattttaaccatgctactttatatattttatatgtatgtgtgtctctattagttgtatatttacaattgtctccattaaaaagagctagagaaagcaaatgggggaatatatttaccttacacccaaacagaattagaacaatctaaaatttaaattcaattaaaaatttcagttatttaaaatgaattattttaacactttgccagacactgtatccaaaagttaacactgcctttatgaagtcatgttagcaagttatttctttaaaatatttaaaatttgattcatgtgtgactaactctcttaacaagttaaaagatcttttgggcaaactgatgaattggtacaaagtgggaagacaaagaaactgggcacttactttttaggccttcttggggttttgtttgtttgtttgttgttttcgttttttgagtcggcaaagactagtgccaaaaagtggcgtgttttctcaggttttgagtagtgaggggaagaatcttccatgtttttcagacagggcaacgaaaagaataccttaaaaatgttttttttttttttggttgtgaaagacattcatgctcagtgtagaaaatttggaaaatacaggaaagcttaaagaagaaaatataaaccgtccataaaggaagcttcttttttttaaagttgtacaaggcaggaatttgattgaagtataaagtgcattcagatgttgcttttcattgaaaaacagcataaattattccttttctacagaaatctcaacttctattctgcagtattgtggtttcaagttatatttttaaagattcatttgaataacaagagtacaatgtaaccaaggtgaagctctgagactcacatagctttgcatcctgccatgggctgtgagttgggaggtggggtcagtttgggactgagtggctgtggtagagatcccatcctgccaaagtttgtgattccacatttctcttccattgtagagcaaatccatccccacaccctgttcactcctttgctgattggtttcgtaatcgtagctggcatgatgtgcattattgtgatgattctgacctacaaatatttacaggtaaccatttatttgttctctctccagagtgctctaatgactgagacaataattattaaaaggtgatctatttttccctttctccccacagaaacccatgtatgaagtacagtggaaggttgttgaggagataaatggaaacaattatgtttacatagacccaacacaacttccttatgatcacaaatgggagtttcccagaaacaggctgagttttggtcagtatgaaacaggggctttccatgtcacctttttgggtacacataacagtgactttaaggaactccagtggcttcctttgttttgttccacctgaaacaatgagttttctgtgaaattgcgccccttttgataggtttgccatagagaacatcgtaggaaaatgtctctggacaacattgtttttaattcctttattgattttgaaactgcacaaatggtccttcaattccaccaccagcaccatcaccacttaccttgttgtcttccttcctacagggaaaaccctgggtgctggagctttcgggaaggttgttgaggcaactgcttatggcttaattaagtcagatgcggccatgactgtcgctgtaaagatgctcaagcgtaagttcctgtatggtactgcatgcgcttgacatcagtttgccagttgtgctttttgctaaaatgcatgtttccaattttagcgagtgcccatttgacagaacgggaagccctcatgtctgaactcaaagtcctgagttaccttggtaatcacatgaatattgtgaatctacttggagcctgcaccattggaggtaaagccgtgtccaagctgccttttattgtctgtcaggttatcaaaacatgacattttaatatgattttggcaatgctagattataaactgcttggaagatttttttacccagactgttgttctctcttgctagattttgttttcctcattgttcttaagaatgcagattttaattttatcattatggggtagaacagcccaggacataccctagttattgtcgtatttgtaacatcaacgacatcagcctcttgaatatctcatcccgaccagaaggcttctgttatcttgtaagctttatacatttcttgatcatatgtagccactgaaagggttaatattaatttgcatactacaatttaaaacaggcgcctaagcctactggttctcaaatatacaccaaatgaggcaaacatttcacttctctaaaaataagtttccaatttgaagccttagttgaagttcccatcaaggatgtctgtgatgtttgcagaaagtatttcagttgaaagaaacaaagatgtgtaaaatgagctgtttctggagatccacgataaagttgacagccttatatcatgtcttccaataatccccataaatgttgcttcaccacatcatgaattgttcatgagaaaatttcttacccaagttaattagttgcctgttacttctaaactacagtttaaacattcatagcaccaaaaaatttttcaactagtagcgctcagaacacaggtcattttaggttttcactcactttccagtcttgtcccagctggctgctccttgtggctgattttcccactatgccacagtttgtgccttcattatttccataataacgttacagagagtgtgtgaagccctgctgtaaacagaagtgaaccagaggattcacgtaggaagcttgataatagtagaatctttgaaagcagtaacttctctctgtaaaaccagcagtcatgcttggctccaaatactaatgtcacttagaaattcaggttaaaagaggcttgcttgttttatgttactccacataaggctgcttttttgataagcagtgttaatatatgggattgtattgggactaagtagtctgatccactgaagctgaatattaatggccatgaccacccttgggtatttttatgggaggcagaattaatctatatatctcaccttctttctaaccttttcttatgtgcttttagggcccaccctggtcattacagaatattgttgctatggtgatcttttgaattttttgagaagaaaacgtgattcatttatttgttcaaagcaggaagatcatgcagaagctgcactttataagaatcttctgcattcaaaggagtcttcctggtaagactgatttacataaatagttagctgttgacaggcagttcatggggtcataagggtttgcaatcaaggctgattctttaaaaaatgaactgaggtactctgaggtatgaaatcaaaattattaaatcatttaaatgtgattaacagtttagaaagttaaattgtgtttttaaagattcaaacctagatttttgctgattttttaaaaatgtattttcagttttcttctacactttagttccatgcaactgaatgcattctatatctgtttctcttacggttctgtcctgcatgtatttccatttatactattgagcttggtactacatgcatgtttccagtgagatactgtttatagggaaaatgctaaagcctctcaagttgccacagtaaagtccctttaaaacctttagcagaatgacaaagagctctgaacatatctccacatgtaggcttcttgccatcgacctctggattattcctgtataccttgcctcttgccctttttatttcatcatgctattaaaagacataactactccagcacattttttaaaaattctggacattattctcatctctttcatcattgatgccattctgaatttgaatcatgtataaagagctttgagtttgacttacaaccagaaaagaattcttctcatatcttgcctattctttctttggaaatgctcttaagggccaccatttgagaagacttcctagatgtacccagtccaacagaagtcatggttattttgcccagtcccctatactgtatattgctgcagttgtgtggtagatttctcctatccttttcatgcactttatatccactgcatcttgcaatggcaagacattgcctcctgaactcttaacaccaggtcctcaaggagacctcagtaaatattattgatgggcaattaccccttaaagccattttctgtacctctggctaaagtttaaaaccccacctgaaactttttatttttttttaatcctataaacttgagtagtttaaagtggtagtagaaactgtacaaaaccactttttgttagtttctcctgggcatgtgctcattatatgaagaaatgagccattttgcttctttccgaaaccttggccctatatatatcctttaactttctgatataatggcctaaattgttcaatcctgtgtgatgttctttgtgctttgggatcccatatgggattggaaccaccagcacactctgaaggagattgttgtcatggtgtttctatgctaatcagaagcaggaagtactagaaatcttgaagagtctccagccaaatgttgcagattgaagaggtccagatggttcagaaaatcatccaaattattggtgtttatctgaaccaacttgatttttttttaaaccttcctccatcagtcactatatgttaacgatctctgcctcctgcataacacgtcttggaagctcttctttgtctttctttcatcttgtctcctggggctcatttagagagtttgaggtaatacgggataccatatttggctctctgtctcccattaaattcattgtgtcaagagacgggaaatttctaacctgagtcctctatatgattatacacaaaaaggacacctagtttctgggcatggaccccaatatcgattattaaaaactcatttcttacagaacaggattttcaaactctttattcaaactttacatgactttcctcaaattggtccagtctattatgtagcaaaggggatgaggaggtagagcatgacccatgagtgcccttctacatgtcccacttgattcagtcatgacttgtttcatctctcccagcagcgatagtactaatgagtacatggacatgaaacctggagtttcttatgttgtcccaaccaaggccgacaaaaggagatctgtgagaataggtgagtacctacctatcaagcaaccaagagtaactttacagagagtatgtatatcatgctaatgtggaatataacatcattcccagtagcaatgatgcagaccagttctgctttatggtagcagtgccaatggtcaatggcagttagggttgcaagtgggtgtttggggtcagagcatatgtttttgtgcctgagtatctttctatagatatgggatctttgctttaattcgccatccctctcctctatggattttgtaacccagcctaggattgttaaatattaactttgtgattcagcatctacctttcctggacaccagggaagtgatctgcctgcaagttcacattagttcattcattaccagcctttggtatgtcattgccactgtcttttcctttcctgacctttatggttgtaattgctaagaaaaatcctctcttcctcacaggctcatacatagaaagagatgtgactcccgccatcatggaggatgacgagttggccctagacttagaagacttgctgagcttttcttaccaggtggcaaagggcatggctttcctcgcctccaagaatgtaagtgggagtgattctctaaagagttttgtgttttgtttttttgattttttttttttttttttttttttttgagaacagagcattttagagccatagttaaaatgcagaatgtcattttgaagtgtggtaaccaaaagcagaggaaatttagtttcttcatgttccaactgctgtctctttggaattcctgttctaatttataagctgtaaagtacaagcctgtctaaatgagtttttctatgaatattcttttatatgcagtgaaattcttttaaaacttttggcttttaggatataggatatgttcctagagaacagaatcattttatcagtaaaagcagagggcacctcatagttacaaggcttggggtgaagcatagacttgagttttattgaagttagatccaaatattatatgtgtggcttatgaagtgtcaggaaataaggggtcagagggagtaataaacacttgggagaaggttaggaatggaaagaatgatggaaccaaaacaaggagcatggtctgtggaagggtgaaaggagttccttaggaagtaagattaaccgaacagaatgagttaccagtcctacccttaaatgtcatgggtgacatttcccaacaattaccaaactaagaaaggatataagatggctgaaataaagaccttcttccgtgtgtccttgggagatgtcagattgaatttgcaaaggcatattaggaactctgtgaaaggacattcaaagagatgcatgcaaaatgaattttcagtttaaacaatatgatatgactatttcttatgtatttccctatgaatgaaagcagtcctgagaagaaaacagcatttattagaattgcttttaaaagagattataataattagactcttgattatgtgaacatcattcaaggcgtacttttgatttttatttttggtgtactgaatactttaaaacaaaagtattggattttttataatataagcaacactatagtattaaaaagttagttttcactctttacaagttaaaatgaatttaaatggttttcttttctcctccaacctaatagtgtattcacagagacttggcagccagaaatatcctccttactcatggtcggatcacaaagatttgtgattttggtctagccagagacatcaagaatgattctaattatgtggttaaaggaaacgtgagtacccattctctgcttgacagtcctgcaaaggatttttagtttcaactttcgataaaaattgtttcctgtgactttcataatgtaaatcctgtctagggatatcacacattttagcagtcaaattaagtatacttcagcaaaatttgcatggtatgctgaacattactacaactaacattcaataatagaagtcctaattctaattgtgtaattttggggcatgtgaaggaaacagaaatagccttaattttcattatagcctgagaatagcaatgaacttgattttgctcaagtgtaacaaatgtaggtcattgaaggtcacagcaggagaaattttggggggattggcatgccgtgtgaaaaatattaaaatctaagatcatattcagagttagccatatagaatgttggatcctagaatacacggagagctattaaataggttcataagtaataatgggtttgtagaacatagcaaatgtttttcaaagtgctgtatttccttgccaatttttattgaatcctcagaacaaacccttgtcctataattgcagcaccttcctattttaaaagttggagaaactaaggcatggcatattttagtgctttttatctgaggtgacacaggacaatagaggctgaaactagagcctgtgatttccagagtggcatcccatcgccatggaaaaccatattgccctttataatattctctgcctgtcttcctgggcccatttctgcagtccagatttattcctggaggtggattttttgtgccccttatgataatgtaatgttttccccccatcactgtggcgtctctattggtagcctgtactcgatttggttttgtaagagtgtttctgtgtttatctcctggccaaagcatgaatttctgaaaaggctgccctgaagctagatattatcatcaggagtgataataaaaacaacttctcttcatcctggtgcaattttggaaggaagaatgataagtcgttaattatccagtcctctgaatattgaccaaagggaggaggaagaaggtggccgcctccaggcccagtcttgatgaattctgcaatctgtctccattatttcatgcctgtgtaattttgtcaagagttgtccaatacctctgaatctttgtttttctccccttgggaataatagtgattcctgactcagaaagttatgagttaatatatgtaaagtgcttatgacagtgccagacatattgttactattctttatagatgtcttatttacgatctaaataatcgtgacggtggttacatactgtcttgttattggttagtgaccttagtttgaaatgacaaagaggggttggctctatcaggcttccagattgtagactccagttcaagtcagttgaactaaccaatcacagatctcgctttcaccaggctagtgggtaaggagaatttctggaacaagataagaagaaggaaactcatatatgttaccgccccacatttttgtcatcatcatttgagatctccttgttgtgtcaggttctctgaagttctttcctttcacatgagttcttcattgtttttcatgtcatggccccttttagagcctggtaaagcctatgggacccttatcagaacactgttttcaacgcctatgataaatacataggaataccaaggaaaacagttaaatcgaaatagctatgaagatactaagtaaatttgtgatatgtcagtacatgtgtttactatagagtgtaacaggctctgttaggttggtgtaaaagtaattgtgggttttgctattttttctaaaaaaccactgtaattttagagtggtgattaatgtaaatatgattttgagatacctataaagacttaataggatatgaagatatttatgattactgttcatgacaaagtcacaggtacagctgatactactgcgttttatcacctttgttagtaatttaaagaaatgctaaatttcatctagaaattagcgaaaataaggatgtcatttttcctttccaagttcacaggcccctgaatttgacacccatagatctcaggttaggagcccttataggaactttagcacaacatctaggaagggaagggatattggaagttttttgttttgtttttgtaagctgactaaaataactttaacaccaaaaaaaaaaaagaaaaaaaaaaaaagctttcccagttttcaatcctaaatggattaagagaaggattgatttagctttttatggcagattaagattgggaatccagaatgcatctaaaaggactagttacagaaagtttagctcaactttaatggagagagttctccaaagagtcaggatcacaagccactactgtttatcaagtacttgcctttcttctaggcaatttttcagatagcactgagtcaggcggtgctaagcatttttacccattttatcttatttaacccacaagacaattcataaaattaaaagtattcattttgttttacagaagaagatactgaggcttaattacaaatattttagtgactttcccagtgtattagagaaagttttgggttttgacagaaaacccaaaataaaagaagtctaggagtagactttataccaggattggtataaaggttccatggagtacccgggcaagtctttcctttccatgcttagccattcctgagtgtaacccccatgtccatggtccaagatgaccaccaggtggatagccagccatcatatccagaaggcagggggcccttgcactagagaagagagggcagagggcacgtgccagctatatttgtaaggaggttttcctgaagctgctatacagcacttacaacttagtggccaaaaccgagtcacctaactacagctagctagctgcaaaggaggctgggaaatgtagtcctaattgtgagaggccgtgtttctgtttttaaggaaggagagggacatattcagtggctgtctctgacgtttgtgctcttaatctccatgccgtactgacatagtgctcacatcttaaaatggggataatgcacttgtgagccatgtatttcagaggtgattgggatcatctgagttcatataggtaaaaggtttttgtgagatggtactcaagttatcactccacatttcagcaacagcagcatctataagaatatcttctgttcaattttgttgagcttctgaattaacattattgactctgttgtgcttctattacaggctcgactacctgtgaagtggatggcacctgaaagcattttcaactgtgtatacacgtttgaaagtgacgtctggtcctatgggatttttctttgggagctgttctctttaggtaaaatgatccttgccaaagacaacttcattagactcagagcatcttcttgaagtttcattggtgtcctgcttccttgtgattaacactgctttgcaaactgtgtctcaggaagcagcccctatcctggaatgccggtcgattctaagttctacaagatgatcaaggaaggcttccggatgctcagccctgaacacgcacctgctgaaatgtaagagccaaaaaatttttcctttaggtcacgttttcccttttatttttctttttagagacagaaacccagatgttgagggttttcataacacagtttgaaatgtcacttggattctttatgacacactggtcaaatgtcatttctgtagtttattttcataatctcttgtcaccaaaaatacagaaagtttcagtaatatttcatacatgcagtgttttatgttatctatatgtcagtccatatgtccagttgcatagccctggaattattactgaagttgctggatgcccatacatttgaaaacaagctgagggcattgaggagggatagtaaatggcccttgtcttgcaggtatgacataatgaagacttgctgggatgcagatcccctaaaaagaccaacattcaagcaaattgttcagctaattgagaagcagatttcagagagcaccaatcatgtgagtataccctggccaggcatagaatcccccttctcccagttccaggtgtgtcctcctcctcaggctttcagggtgaggactaacctcccaaccccttctctcctaatcttaggttgcaaattgggcttcaggtaggggaagtaaagcaatggaaactagttctttctgcccagccctcctgttctgagccaaagaaggatgtgagattgagggggaagggtggagagttttgtactcactggaagtagaagtttccataaggatttgccatgtttcctccctcatctcaaatgctggtcacggggtcagtattttctccctctcacatgtcagggccatgcatcctttggagggttggggtgatgtgaactagaataaaagcatagaaaagacagcttgttactgcagtgaaataagccttctgatcaaacaagcatagccagaaaatggcagatagctgtcatgcccacaagccatatagaatgaagagctgtttgaagttgggagatccctcccagtgatttgggaagtgtgggggaatgaaaactcaaatccattatttcctctctttttaagcaagaattagtgatactttgactcagatttttttaagctgctttctttcctgggctgtgtgcttggagctatcttttctttcctaatagcacaccactgataatttttgggttaaagcttgttcttctgggtgtcaaaacatgtttcaaattgaacagcattttccacccagttgctttgattcttgacaagagacccctggaaggccgtgggtttcccagcaaattacattggttattgggttgtagttgctggagagatttacaagccttttaaataggtaagatagtgcttggtgcctggtgtgcccttttagaagagctaagcttgtgcatgttttgtccccacttcttgtataaagttatttccttggaaaaatgaagggggaaaacaaagcttatatttgttttgtcagtatgacttgggttttggccacaaagttcttggaaaccacttctctcttaagagtttccatcagttagttgtgatcttgacactgtaagtatgccttttgttgctatgttcgttgtagggactgctgtattgactatgggcttgttttctccagatttactccaacttagcaaactgcagccccaaccgacagaagcccgtggtagaccattctgtgcggatcaattctgtcggcagcaccgcttcctcctcccagcctctgcttgtgcacgacgatgtctgagcagaatcagtgtttgggtcacccctccaggaatgatctcttctttggcttccatgatggttattttcttttctttcaacttgcatccaactccaggatagtgggcaccccactgcaatcctgtctttctgagcacactttagtggccgatgatttttgtcatcagccaccatcctattgcaaaggttccaactgtatatattcccaatagcaacgtagcttctaccatgaacagaaaacattctgatttggaaaaagagagggaggtatggactgggggccagagtcctttccaaggcttctccaattctgcccaaaaatatggttgatagtttacctgaataaatggtagtaatcacagttggccttcagaaccatccatagtagtatgatgatacaagattagaagctgaaaacctaagtcctttatgtggaaaacagaacatcattagaacaaaggacagagtatgaacacctgggcttaagaaatctagtatttcatgctgggaatgagacataggccatgaaaaaaatgatccccaagtgtgaacaaaagatgctcttctgtggaccactgcatgagcttttatactaccgacctggtttttaaatagagtttgctattagagcattgaattggagagaaggcctccctagccagcacttgtatatacgcatctataaattgtccgtgttcatacatttgaggggaaaacaccataaggtttcgtttctgtatacaaccctggcattatgtccactgtgtatagaagtagattaagagccatataagtttgaaggaaacagttaataccattttttaaggaaacaatataaccacaaagcacagtttgaacaaaatctcctcttttagctgatgaacttattctgtagattctgtggaacaagcctatcagcttcagatggcattgtactcaatggatttgatgctgtttgacaaagttactgattcactgcatggctcccacaggagtgggaaaacactgccatcttagtttggattcttatgtagcaggaaataaagtataggtttagcctccttcgcaggcatgtcctggacaccgggccagtatctatatatgtgtatgtacgtttgtatgtgtgtagacaaatatttggaggggtatttttgccctgagtccaagagggtcctttagtacctgaaaagtataccagaagcttccatagtggtgcagaggaagtggaaggcatcagtccctatgtatttgcagttcacctgcacttaaggcactctgttatttagactcatcttactgtacctgttccttagaccttccataatgctactgtctcactgaaacatttaaattttaccctttagactgtagcctggatattattcttgtagtttacctctttaaaaacaaaacaaaacaaaacaaaaaactccccttcctcactgcccaatataaaaggcaaatgtgtacatggcagagtttgtgtgttgtcttgaaagattcaggtatgttgcctttatggtttcccccttctacatttcttagactacatttagagaactgtggccgttatctggaagtaaccatttgcactggagttctatgctctcgcacctttccaaagttaacagattttggggttgtgttgtcacccaagagattgttgtttgccatactttgtctgaaaaattcctttgtgtttctattgacttcaatgatagtaagaaaagtggttgttagttatagatgtctaggtacttcaggggcacttcattgagagttttgtcttggatattcttgaaagtttatatttttataattttttcttacatcagatgtttctttgcagtggcttaatgtttgaaattattttgtggctttttttgtaaatattgaaatgtagcaataatgtcttttgaatattcccaagcccatgagtccttgaaaatattttttatatatacagtaactttatgtgtaaatacataagcggcgtaagtttaaaggatgttggtgttccacgtgttttattcctgtatgttgtccaattgttgacagttctgaagaattctaataaaatgtacatatataaatcaagtggagtcatttgattgttgagattcgttgagattaaactttaaagcattaaagtgcaatcatcctgacaaagttttgtacgcagttttcataaaatatgtgcagggctatcagatcacgctaggatttacatgcttcgagattcaacagatattaagaattttcatacgtgtgatattttctcattttagtcttacaacctgaggtctctatttaaattgaaaaatagatacagagaaggtgcttagtatgtatgagctgggtgctgtcatgtgggtgaaacattatgcatgcccaattggtaccgtccagaccactggaacccaaacagaggctgagagttcttcagcttgaaacaaaaggaagcaccctgaatcacataatcttattaagaatgaggcacccacacaccctcagtcatgactgtctttattgacgtgacatctacacctgcagaaatgtctcctgaaaggaaagggaaggggtgaaaagtgacctgtaatgaaaaggaatccttttaaaatccagagggaattgtgtggcaaggaatgcgtcaataatcagtgaaaaacagacccacatttcagtcaggcaattcccattattttattgcagacaggaatgaatgctaattgaccacaaaacaaagaagtcttttctttccaaatgttttcactgtcatttagcctttgtcatgtgtgagaaatttgcgttagaagcagttgacagtcccctgtgttaagagtctagctaattttcctc

SEQ ID NO: 39 - DNA, 6268 bp, Homo sapiens
  misc_feature (2654)..(2654): where "n" is a or c or g or t
  misc_feature (3054)..(3054): where "n" is a or c or g or t
  misc_feature (3088)..(3088): where "n" is a or c or g or t
  misc_feature (3099)..(3099): where "n" is a or c or g or t
  misc_feature (3102)..(3102): where "n" is a or c or g or t
  misc_feature (3107)..(3107): where "n" is a or c or g or t
  misc_feature (3338)..(3338): where "n" is a or c or g or t
  misc_feature (3437)..(3437): where "n" is a or c or g or t
  misc_feature (3463)..(3463): where "n" is a or c or g or t
  misc_feature (3479)..(3479): where "n" is a or c or g or t
  misc_feature (3483)..(3483): where "n" is a or c or g or t
  misc_feature (3485)..(3485): where "n" is a or c or g or t
  misc_feature (3513)..(3513): where "n" is a or c or g or t
  misc_feature (3520)..(3520): where "n" is a or c or g or t
  misc_feature (3536)..(3536): where "n" is a or c or g or t
  misc_feature (3606)..(3606): where "n" is a or c or g or t
  misc_feature (3649)..(3649): where "n" is a or c or g or t
  misc_feature (3668)..(3668): where "n" is a or c or g or t
  misc_feature (3709)..(3709): where "n" is a or c or g or t
  misc_feature (3736)..(3736): where "n" is a or c or g or t
  misc_feature (4760)..(4760): where "n" is a or c or g or t
  misc_feature (4781)..(4781): where "n" is a or c or g or t
  misc_feature (4789)..(4789): where "n" is a or c or g or t
  misc_feature (4792)..(4792): where "n" is a or c or g or t
  misc_feature (4806)..(4806): where "n" is a or c or g or t
  misc_feature (4810)..(4810): where "n" is a or c or g or t
  misc_feature (4839)..(4839): where "n" is a or c or g or t
  misc_feature (4854)..(4854): where "n" is a or c or g or t
  misc_feature (4856)..(4856): where "n" is a or c or g or t
  misc_feature (4879)..(4879): where "n" is a or c or g or t
  misc_feature (4894)..(4894): where "n" is a or c or g or t
  misc_feature (4907)..(4907): where "n" is a or c or g or t
  misc_feature (4914)..(4914): where "n" is a or c or g or t
  misc_feature (4935)..(4935): where "n" is a or c or g or t
  misc_feature (4942)..(4942): where "n" is a or c or g or t
  misc_feature (4986)..(4986): where "n" is a or c or g or t
  misc_feature (5003)..(5003): where "n" is a or c or g or t
  misc_feature (5024)..(5024): where "n" is a or c or g or t
  misc_feature (5025)..(5025): where "n" is a or c or g or t
  misc_feature (5029)..(5030): where "n" is a or c or g or t
  misc_feature (5041)..(5043): where "n" is a or c or g or t
  misc_feature (5045)..(5045): where "n" is a or c or g or t
  misc_feature (5049)..(5049): where "n" is a or c or g or t
  misc_feature (5063)..(5063): where "n" is a or c or g or t
  misc_feature (5066)..(5066): where "n" is a or c or g or t
  misc_feature (5074)..(5074): where "n" is a or c or g or t
  misc_feature (5084)..(5084): where "n" is a or c or g or t
  misc_feature (5087)..(5087): where "n" is a or c or g or t
  misc_feature (5109)..(5109): where "n" is a or c or g or t
  misc_feature (5116)..(5116): where "n" is a or c or g or t
  misc_feature (5118)..(5118): where "n" is a or c or g or t
  misc_feature (5301)..(5301): where "n" is a or c or g or t
  misc_feature (5323)..(5323): where "n" is a or c or g or t
  misc_feature (5331)..(5331): where "n" is a or c or g or t
  misc_feature (5334)..(5334): where "n" is a or c or g or t
  misc_feature (5347)..(5347): where "n" is a or c or g or t
  misc_feature (5419)..(5419): where "n" is a or c or g or t
caggcaagagcaccccgagcaaaggaagaagacgacttgcctccggagctatcactggggagtgggaatttggaaagttccccaactagggacacacgtgacctccttcggaaagtagttccgactgtggcccgtgtatccttccacctccttttgaaccctcctaggtctcctcgccccgcccactcgctgggctgcagcttcctaccgttccgtactttccactcaacccggtaaccccaaacgtgcacggtccggccggggcgcgcggagcctggccccgggcgatccatcctgccgggttttcacgcggccaaggggggcggggctaggtggtctctgagaaccgagcttgactccgacgccgcgaaccgacctggagcccgaggggaaagatgctcgactctcttgggggcaccggagcgggcgcaggagaggcctgcggggtgcgtcccactcacagggatcctctttcagttcatttagataggtgccctttgggcccttgaaattcaacggctatgtgttcacgttcagcacgctcggctgagagctttcatttttagggcaaacgagccgagttaccggggaagcgagaggtggggcgctgcaagggagccggatgaggtgatacacgctggcgacacaatagcaggttgctctttgtgctaagactgacaccatgaggacacagatttgggggaagggggaatctctaggcaaaggctgttacagtcaaatctctgcgaacgattgtgatccgacagcggtgcaaaaggaaagagcgaatgcagtccacgccgcggaatctaggggtagaggcaaggggggagggtattccccttgcagggaccgtccctgcatttccctctacactgagcagcgtggtcacctggtccttttcacctgtgcacaggtaacctcagactcgagtcagtgacactgctcaacgcacccatctcagctttcatcatcagtcctccacccccgccccacaacagcctaccctgcctccggctgggtttctgggcagaggccgaggcttagctcgttatcctcgcctcgcgttgctgcaaaagccgcagcaagtgcagctgcaggctggcggctgggaaccggcccgagcaagccccaggcagctacactgggcatgctcagtagagcctgcggcttggggactcgtgcgcttcgcacccagagctaccgctcgtgccccctcctaccgccccctgccctgccctgccctcccctcgcccggcgcggtcccgtccgcctctcgctcgcctcccgcctcccctcggtcttccgaggcgcccgggctcccggcgcggcggcggagggggcgggcaggccggcgggcggtgatgtggcaggactctttatgcgctgcggcaggatacgcgctcggcgctgggacgcgactgcgctcagttctctcctctcggaagctgcagccatgatggaagtttgagagttgagccgctgtgaggcgaggccgggctcaggcgagggagatgagagacggcggcggccgcggcccggagcccctctcagcgcctgtgagcagccgcgggggcagcgccctcggggagccggccggcctgcggcggcggcagcggcggcgtttctcgcctcctcttcgtcttttctaaccgtgcagcctcttcctcggcttctcctgaaagggaaggtggaagccgtgggctcgggcgggagccggctgaggcgcggcggcggcggcggcacctcccgctcctggagcgggggggagaagcggcggcggcggcggccgcggcggctgcagctccagggagggggtctgagtcgcctgtcaccatttccagggctgggaacgccggagagttggtctctccccttctactgcctccaacacggcggcggcggcggcggcacatccagggacccgggccggttttaaacctcccgtccgccgccgccgcaccccccgtggcccgggctccggaggccgccggcggaagcagccgttcggaggattattcgtcttctccccattccgctgccgccgctgccaggcctctggctgctgaggagaagcaggcccagtcgctgcaaccatccagcagccgccgcagcagccattacccggctgcggtccagagccaagcggcggcagagcgaggggcatcagctaccgccaagtccagagccatttccatcctgcagaagaagccccgccaccagcagcttctgccatctctctcctcctttttcttcagccacaggctcccagacatgacagccatcatcaaagagatcgttagcagaaacaaaaggagatatcaagaggatggattcgacttagacttgacctgtatccatttctgcggctgctcctctttacctttctgtcactctcttagaacgtgggagtagacggatgcgaaaatgtccgtagtttgggtgactataacatttaaccctggtcaggttgctaggtcatatattttgtgtttcctttctgtgtattcaacctagggtgtgtttggctagacggaactcttgcctggttgcaagtgtcaagccaccgattgctttcttaggctatctatatggtctcttcctgagggctattgtccgttaatacagaatacagtacactgttagtggatagncgagctcggtaatccggtctccgtaaatgaacaaaaaagtagacgctttttgaggttgagcatatttcgattaaatcttggcttaggccctagatcaagggtttagatcagaataaaatgaaaattagtgttgcacgtacgcatattgcatcagaatcttgcagtgattgttttagtttcctgagttgcattgatagattcttttaaaatatgactgatttgcataactttagaagcagaatcattttcagtatatatggtgcacattgagggcaaaaagtagttttgttaatgtttaaacttaagttacctacaactttgaactgtatgtagaagttttgtagtttgaagtcaatagtgccataatataccttataaggcgttcttactagatctttgntatattttacctttttctctccctatggggtgangtatgatagtnctngaaantagcacttcagtagcatttaatgttcagtgctcttgtcataaacatagaatggatattgagtagtttctgatcccagatggtaatgtgtaggttcaagggtattgtgtgtagcaagtgaagattgcagaaataaaacttcagttcatgcttgaaatttaagtattgttgtgatgccagaattgctgctcaccgtttttaggtttcaggtcctctgacaccttttggtatcngttaattttactgatttgtgtagaatgtcaggttgtattttaccagctaatatctagaaatgctggcaagaggggtttactccagctttagattgtaangtatgttagcttttttcatacagtgnattaaatttactgagncagntngctgaataagacagaagcccaagaattntaacagngtgtagctttagttgnctaaaagttaggccttagggcttcaaaagttagtggtcatcgaaaagcattaatctttgcagtttcaggnacaacacattggttttgattagggatggggatggggccctctntttgcagaatggggaaagnattgacaggaattgagagctattggtaggccagtgtataanggatgtgaaaacagaaataaggtaatnggtctgaagtgactgaagcatttaggctctatcaaggcctaaaatttggtaatatgagtttggtaatgcgaattgtggcagtggacaatatttagttaaaattatgtaattgcataagtactagcacagtatttttaataaaagttatttcttagcaaatgtcagttgcattttgtctaaaggtagagtgacactacagtgtctatatgtcctgctaaaaattgtggggaatatttttttttaagacagcgtttatatcgggagaggttttattccgttggattatgttagctgcatataaatgtgcacagttaattttgcccaagtttttgttttgaaatgaatgtaaaacttactgaagaagtagcttcccaaaatttagttttctgttaagccaaaaatattattttaaaagagtatttgcaaattttgaagttgacattaattgagaatgttactaaggctaaactggacccgcttgcccagaagataattatggaaaaattcttttgtgacttccaaagcagtctactattagcatgaattactgacagtcatccaaatatataggaacaaaaaattaaatgtttatgtaactttgaaaaaaaagcctttgaagaaaataattgaatgctgtctgggagacagatttctttcagcacttaaagtacataacacactacttttacttttcccacttgattttaaattatcagggttattaagaccttaaaattattttaccaggtttttacatgtgagctgtgacatgactggcattttctttgatttcagcgtatgttggtctctacacatgaaatttgtgtgacttaaaactttctctaaaactgtacttttagttatgatatgcatagaaagcagtatcaaatattgcgtcaaatgactaataacacttaatttctagagttgtggttttattgagccaaaagttgatatgaaaaaaagtcagtaaggaaagtcagtgaagtgcttgcttttttgataattgcactcccaataattntgatattccaacgtacttggnttgcttgnttncacgttaatgctcnctgnttattggagtgggaaggcattaaaattgncattgaagactttgncnttgacatgttgcagtatttattncagtaactaacctgngaaaagttaaatncctttangaaagtagtgattggagtatntttatcngataaagaaagattaataatgaagccatttctccgaggaaaatngaggacaataattcagntctaaaatattatcgcaaaannaaannattctaaaaannngntagnagggttatatgctnaanattagtcngaaatatagngcngaatttgagactatagaaaaantaagtgnanatagggtatgtggaaacgttaggcttctgttgtattttttattgtttggtagatttgcctcttttcaaataaatgttcacagggaatacttttaacttgtagagagtacagtgactattgaagttacctaaattacctcaaggtaagtgattactgaaattaatcatgagggttttaaaaagnattctattcacaacatttattntacattgnttngtatctgctaagntatatttcctgaaaaacatgactggaccacctaattgctgtatgataacttacaaacttcatttttcatagngcttattcaagtgtaaagcacaactgaaaggagtaatgtacagtttatatgaggaaaaaggaattttattgctgccagtgtaaaagtttgcacagcagtatagtcatcaatgctgatttacattgcttataatatactaagtaaatactaaatgattaaagataataaaatatggtgaggtataaccaccttcattttaaacttagttttagaagatagtaaagaaagattcctttattacctttttagaattttatttttaataacatgggaaaggcaactggtgatattttaatttttgtatggaacagtgcatctgctttctcatagccacataaaatacataaacttcttagtgttatgaaatggcttactttttggaagtgaagaagtcttcaattcttattttctaatgttattttgaaatttgcctccatttgctgtttgttcatttggtgatagcgcaacacttaaaaaaatattttaagccgcttctgaagtaatcacttcagtgacttttaatggaggagtatttgttatgggaaattcacttcacaaagttttaacattaattcacttgaagtaaacgtgctatttttaaattttcatctcaatcttttaagtaagacgaaagcttaggaaatcacttttattattgatattgtgtgtgacttcagagtttgtaaagagaattgtagaagtgttgcatgcatatgacaattttctgcttaattgaaatgtgaggcctctgccatactacaaggatttagcttccagaaaatgtaatattaacatagcttaagaaatgtatttttttttttctgtagaaaccgttgggttaaacaaaaa

SEQ ID NO: 40 - DNA, 14543 bp, Homo sapiens
gaattcagttagttgactttttgtactttataagcgtgatgattgggtgttcccgtgtgagatgcgccaccctcgaaccttgttacgacgtcggcacattgcgcgtctgacatgaagaaaaaaaaaattcagttagtccaccaggcacagtggctaaggcctgtaatccctgcactttgagaggccaaggcaggaggatcacttgaacccaggagttcgagaccagcctaggcaacatagcgagactccgtttcaaacaacaaataaaaataattagtcgggcatggtggtgcgcgcctacagtaccaactactcgggaggctgaggcgagacgatcgcttgagccagggaggtcaaggctgcagtgagccaagctcgcgccactgcactccagcccgggcgacagagtgagaccctgtctccaaaaaaaaaaaaaaacaccaaaccttagaggggtgaaaaaaaattttatagtggaaatacagtaacgagttggcctagcctcgcctccgttacaacagcctacggtgctggaggatccttctgcgcacgcgcacagcctccggccggctatttccgcgagcgcgttccatcctctaccgagcgcgcgcgaagactacggaggtcgactcgggagcgcgcacgcagctccgccccgcgtccgacccgcggatcccgcggcgtccggcccgggtggtctggatcgcggagggaatgccccggagggcggagaactgggacgaggccgaggtaggcgcggaggaggcaggcgtcgaagagtacggccctgaagaagacggcggggaggagtcgggcgccgaggagtccggcccggaagagtccggcccggaggaactgggcgccgaggaggagatggaggccgggcggccgcggcccgtgctgcgctcggtgaactcgcgcgagccctcccaggtcatcttctgcaatcgcagtccgcgcgtcgtgctgcccgtatggctcaacttcgacggcgagccgcagccctacccaacgctgccgcctggcacgggccgccgcatccacagctaccgaggtacgggcccggcgcttaggcccgacccagcagggacgatagcacggtctgaagcccctctaccgccccggggtccattttgcagacggggaactgaggccccttgaggcaggacacatccagggtgacgctgctcgtaagcgtcagagcattctttttttttttttttttttttttctgagacggagtctcgctctgtcgcccaggctggagtgcagtggcgcgatctcgactcactgcagcctccgcctcccgggttcaagcgattctcctgcctcagcctcctgagtagctgggattacaggcgtgcgccaccgcgcccggctgatttttatatttttagtagagacggggtttcaccatgttggtcaggctggtctcgaactaactgacctcgtgatccgcccgcctcggccttcccaaagtgctgggcttatgggcatgagcctccgcgcccggcccagagcattctttataaggccgaatagtttgcatttgaaggtggctcccccccagtcccccaccccacgtgtattttcccctcaaagaaaagctgcatccttaacaccccatctgttcagtcctcatgactccagtgggccagttctgcgtagtccctgccctcgtggagaacacattcctcctggggagactgacagatgcaaagacaggaacaagccagggtcatgttggcgccggaagagccgaccgtgtgtggcgtgggaaattgacttacctgcctgctgggagatggaggggttgcggttgtgtggtttcagttaaggagcacttcccggagaaggaagagagcaggatggagtaggaactagccaaccctaggtaagaggttctagacatgcgtgcgttgagacctggagtcttgggagaggatgcttaaaaggtgattttacccctaggaatatgggggcactgaaatttttttttttttttgagacgggagtcttgctctgcaagctggagtgcagtggcccacgctagaatgcagtggcgcgattgcggctcattgcaacatctgccacctggggtcaagtggttctcttgcctcagcctcccgaggagcggggattactggcgtgcgccaccactcctggctaattttttttttagtagagacgggggtttcgtcattttggctaggctggtctcgaactcctgacctcagatgatccacccgccttggcctcccaaagtgctgagattacaggtgtaagccactgcgcccagccctttgaaagtttttcagtatttatgtatatatatttttgagttggagtctggatctgtcgccagactggagtgctgttgcacaatcttggctcactgcaatctccgactccctggttcaagcgattctcctgcctcagcctcccaagtagctgggattacaggcacgcactaccattcccagctaattttttgtattcttagtagagacagggtttcaccatgttggccaggatggtctccatctcctgcgctcgtgatctgcctgcttcggcctcccaaagtgctgggattacaggcgtgctgggatttcggccacaacgtccgaccgaaagtttttaagcagggacatgacattgtcagatttatatactgaaaagctcacccaggttgccaagtggtttggaggggaaagactgctgtcgaggaagcagttaggtagttgtgaaaacccaggtgaggaataactaggccttacctaaggtgcaggcagtaatcttgccatggcctttaagcagagaagtagtcctagtgtcacttaatctttacaaaggatttttgcaaggatcccgatctttcttccttgagggtggtgtacttaatacacttttacaccagacttctaatgttagatgaagaacacagtatttccagggatcaacatttctgtaggctcctattttatataggaaattgtatgaattttgtattttactccaaaatttttctgtgcccgatttaatataaaaatttactgagcctgggtgcagtggctcatgcctgtgatctcagcactttgggaggctgaggcaggaggatttcttgagcccaggagctggagaccagcctgtgcaacatagtgagaccctgtctgtatttaaaaaaaaaaaaaaattcttgaaaaattagcagggcacattcctgcctttagtcccagctacttgggaagctgaggcaggaagatcacccgaacccaggagttggaggctacagtgaactatgatggtgcctctgaatagttgctgtactctagtctggtaacacagcaagaccctgtctctctatcttgtctttttttttttttttttttgagacaggatgtcctgctgttgcctgggctggagtgtggaggctggagtttggtggcatgatcacggctcattgcacccttaacctgggctcaagcagtcctcccagagcttcagcttcccaaagtagctgggactataggcatgctccactatgtctggctaatttctttttttatttttatttttagtagagatgaggtcttgctatgttgcccaggctgagacctcatctcttttttattttttttaaattttttattatactttaagttctagggtacatgtgcacaacgtgcaggtttgttacatatgtaaacatgtgccatgttggtgtgctgcacccatagagacctcgtcttaaaaaaagaaaataacattacttttgaaggtacttaatgcactgaattgtacatttaaaaatggttaaaatggtaaatgtttgaggcaggtagatccacctgaggtcaggagttcaagaccagcctgaccaatatggtggaaccctgtctctgctaaaaatacaaaagttagctgcatgtggtggcatgcgcctgtttagtcccagctactcgggaggctgaggcaggagaattgcttgaacctgggaggcggaggtggcagtgagccaagatcacaccactacactccagcctgggcaacagagcaagactccatctctaaataataaataaaatggtaacttttatgtatattttaccaaaatttaaaaaattacaagtttacatttcttaaaatttcccatcaaatctgtaagtaaatttatgccccgaggaacaagtgctatatttattctgagacaacctcctccttccttaaacagaatcttagggctggaggattgcttcctgccctcttttgtttgtgatgtatgcattttgaaaattctgggccgggcgcagtggctcactcctgtaatcccagcactttgggaggccgaggcgggcggatcacaagatcaggagattgagaccatcctggctaatacggtgaaaccctgtctctactgaaaataacaaaaaattagccgggcgtggtggcgggcacctgtggtcccagctatttgggaggctgtggcaggagaatggcataaacctgggaggcggagcttgcagtgagccgagatcgtgccactgcactccagcctgggcgacagagcgagactgcatctcaaaaaaaaaaaaaaagaaaaagaaaagaaaattctggtataatttacatacagtaaaatgcacagatcttagggtttgatgagttttctctcgacatgtttttgcacttccttgtttttgagaagcactgatttgagaagtcagtggctttttctctttagtttgcagggtttgctgtgatttgtaatcacgtacttgacctaggcttcccttttccaccatggtagcagaaagggcatgggatttagagctttaagtacgcgctctttgcttactgtcttataccttgagcatgtcacttctcctctcagacttgttttctcatctgtaaatggatctgttgtgaggactgactgagataatgttactagaagggctttgtataatatttaagcagagtgagaggtaagctttttgtgtaggtcaggggaaatggagaaaataggtgccctgactcagaccagtctggctctttttttttttttttttggagacggagtcttgctctgtcacccaggctggagtgcagtggcgcgatctcggctcacggcaagctccacctcctgggttcacaccattctcctgcctcagcctcccgagtagctgggactacaggcgctcgccacacacctggctaatttttttgtatttttagtagagacgaggtttcaccacgttagccaggacggtcttgatctcctgacctcatgatccgcctgcctcggcctcccaaagtgctgggattacaggtgtgggccaccgtgcccagccaccggtgtggctctttaacaacctttgcttgtcccgataggtcacctttggctcttcagagatgcagggacacacgatgggcttctggttaaccaaactgaattatttgtgccatctctcaatgttgacggacagcctatttttgccaatatcacactgccaggtactgacgttttactttttaaaaagataaggttgttgtggtaagtacaggatagaccacttgaaaaattaagcccagttctcaatttttgcctgatgtcaggcacggtatccaatctttttgtatcctattctctaccataaataaaatggaagtgatgtatttgtacgttatgtgttaaaggtgttatggtgtctcaaaagcactttgggctcttaagagacaagcgaaattaaagtatcatatcataggttagttttgtagaattgtagaattacgaatgccttttgtttccctggccaaattgtgccctggagttccaggagaacaatgtgtagagcatgagatattttggcttatttgttgctgacttctaattttttttatttttttgagacagaatctcgctgtgttagctaggctggagtgcagtggcgcaatctcggctcactgcaacctccgcctactgggttccagcgattctcttgtctcagcctcccgagtagctgggactacaggcgtgtgccacccactctgataattttttgtatttttagtagagacggggtttcaccgtgttagccaggatggtctccatctcctgacctcatgatctgcccgcctacgcctcccaaagtgctgggattacaggcatcagccacagcacctggcctatgtattttcaatttaacacaatcaagctcacagtgccaatcagaggtgttttttttttttttaatttttatttttagagagtctcacagtgtcatccaggctggagtgcagtggtgcgatttcagctcactgcaacctctgcatcctgggttcaagtgattctcctgcctcagcctcctgggtagctggggttataggtgcctgtcaccacacctggctaatttttgtatttttagtagagatgaggtttcaccatgttggccaggctgatcttgaactcctgacctcaggtgatctgcccacctcagcctcccaaagtgctgggattacaggcgtgagccactgcgtccagcctgtttttttttttttttaaatcattgaagattggtataatacttcactatttgtttgaagctcaaatgattttatcagggtaaaccctaataaactgatgttcctgtgggtaaaaaaaacctcactaaagaccagcagtgtgtggtggctcctgcctgtaatcatgcctgtaattccagcacttagggaggctatggcgggagggtcgcttgagaccaggagttcttgaccagcctggacaacaaagtgagaccccagctccacaaaaaaatttttttttaattacctgggcatcttagcatatgcctgtggtcacagctatttgggaggcttaggtgggaggatcccttgagcccaggagtttgaggctgcagtgagccatgatcataccactgcactccagcccaggtgacagagtgagatcctgtctcaaaaaaagaaaaaaaaaactcaaaaaccccccaaatacatgggtttcataggatccaaactactatgtgtgtatagatcctgttttaaggaagtagatatataaaaatgagcattgctaagttaaatttggtaaatttgccttatagaacaccctcgagtacgtttccagtgagtgtaaaataggaattgggatacccaattcagttgtactaaattttcttttttttttttttttttgagacggagtctcgctctgtcgcccaggctggagtgcagtggcgggatctcggctcactgcaagctccgcctcccgggttcacgccattctcctgcctcagcctcccaagtagctgggactacaggcgcccgccactacgcccggctaattttttgtatttttagtagagacggggtttcaccgttttagccgggatggtctcgatctcctgacctcgtgatccgcccgcctcggcctcccaaagtgctgggattacaggcgtgagccaccgcgcccggcctagattttctaagtacacattgttttggttatgtgttttgtgactaccaccccaaaactaataaccaccttttttttttttttgagacagagtctcactgtgtcacccaggctggagtgcagtggcgtgtgatcttggctcactgcaacctctgcctctcgggttcaagtgattctcctgcttcagcagctgggactacaggtgtgcaccaccaagcctggctaattttttgcattttagtggagacgggggtttcaccatgttgaccaggctgatcttaaactcttgagctcaggcagtctgcctgcctcagcctcctaaagtgctaggattacaggcgtgagccactgcgcccagcccaccgttttatttgttcataattctgtagtccaggctgggctcagctaggcagttactctgctggtggtagtcgttggtgtggctgccttttgctggcagctgggggctgggcctgtccctcttttttttttttctcttttcttttttcttttttttcaagatagggtctcactctgtcacccaggttggagtgcagtggcatgatcttagctcactgcaacctctgcctccagggctcaagtgatcctcccacctcagcctccccagtcgctgggaccacaggcatgtgccaccatgcctggctaattttttgtgtattttgtagagacggggtttcgccatgttgccaggctggtctcgaactcctgagctcaggcgatctactgacgttggcctcccaaagtgttgggatcacaggcatgaaccaccatgcctggccagggcctgttcctctttatgtggtctctctagcagggtagctcagggctttcaaaagtataaaagcagaagtcagcaggcctttttaaggcttcggcctagaattgccagtgtcgcttcatcgacattcagttagttaaagcaatcacaagcccagcccatttcaaggtgaaattactacagaggcatgaacaccatgaggtgtccatagggggccatcagcataacacactgccacatacatgcactcactttttttctttaacctaaagtgagatccatcagtagtacaggtagttgttggcaaagcctcttgttcgttccttgtactgagaccctagtctgtcactgaggatttggtttttgcccttccagtgtatactctgaaagagcgatgcctccaggttgtccggagcctagtcaagcctgagaattacaggagactggacatcgtcaggtcgctctacgaagatctggaagaccacccaaatgtgcagaaagacctggagcggctgacacaggagcgcattgcacatcaacggatgggagattgaagatttctgttgaaacttacactgtttcatctcagcttttgatggtactgatgagtcttgatctagatacaggactggttccttccttagtttcaaagtgtctcattctcagagtaaaataggcaccattgcttaaaagaaagttaactgacttcactaggcattgtgatgtttaggggcaaacatcacaaaatgtaatttaatgcctgcccattagagaagtatttatcaggagaaggtggtggcatttttgcttcctagtaagtcaggacagcttgtatgtaaggaggtttatataagtaattcagtgggaattgcagcatatcgtttaattttaagaaggcattggcatctgcttttaatggatgtataatacatccattctacatccgtagcggttggtgacttgtctgcctcctgctttgggaagactgaggcatccgtgaggcagggacaagtctttctcctctttgagaccccagtgcctgcacatcatgagccttcagtcagggtttgtcagaggaacaaaccaggggacactttgttagaaagtgcttagaggttctgcctctatttttgttggggggtgggagaggggaccttaaaatgtgtacagtgaacaaatgtcttaaagggaatcatttttgtaggaagcattttttataattttctaagtcgtgcactttctcggtccactcttgttgaagtgctgttttattactgtttctaaactaggattgacattctacagttgtgataatagcatttttgtaacttgccatccgcacagaaaatacgagaaaatctgcatgtttgattatagtattaatggacaaataagtttttgctaaatgtgagtatttctgttcctttttgtaaatatgtgacattcctgattgatttgggtttttttgttgttgttgttttgttttgttttgtttttttgggatggagkctcactcttgtcacccaggctggagtgcagtggcgccatctcggctcactgcaacctctgcctcctgagttcacgtaatcctcctgagtagctgggattacaggtgcctgccaccacgctggccaatttttgtacttttagtagagacagtgtttcgccatgttggccaggctggtttcaaactcctgacctcaggtgatccgcccacctcagcctcccaaaatggtgggattacaggtgtgtgggccaccgtgcctggctgattcagcattttttatcaggcaggaccaggtggacttccacctccagcctctggtcctaccaatggattcatggagtagcctggactgtttcatagttttctaaatgtacaaattcttataggctagacttagattcattaactcaaattcaatgcttctatcagactcagttttttgtaactaatagatttttttttccacttttgttctactccttccctaatagctttttaaaaaaatctccccagtagagaaacatttggaaaagacagaaaactaaaaaggaagaaaaaagatccctattagatacacttcttaaatacaatcacattaacattttgagctatttccttccagcctttttagggcagattttggttggtttttacatagttgagattgtactgttcatacagttttataccctttttcatttaactttataacttaaatattgctctatgttagtataagcttttcacaaacattagtatagtctcccttttataattaatgtttgtgggtatttcttggcatgcatctttaattccttatcctagcctttgggcacaattcctgtgctcaaaaatgagagtgacggctggcatggtggctcccgcctgtaatcccagtactttgggaagccaaggtaagaggattgcttgagcccagaacttcaagatgagcctgggctcatagtgagaacccgtctatacaaaaaatttttaaaaattagcatggcggcacacatctgtaatcctagctacttggcaggctgaggtgagaagatcattggagtttaggaattggaggcggcagtgagtcatgagtatgccgctgcactccagcctgggggacagagcaagaccctgcctcaaaaaaaaaaaaaaaaaaaattcaggccgggaatggtggttcacgcctgtaatcccagcactttggggggtcgaggtgggcagatcacctgaggtcaggagttcgagaccagcctggccaacatggtaaaaccccatttctactaaaaaatacaagaattagctgggtgtggtggcgcatgcctgtaatcctagctactcaggaggctgaggcaggagaatcacttgaccccaggaggcgaagattgcagtgagctgatatcgcaccattgtactccagcctgtgtgacagagcaatactcttgtcccaaaaaaaaaaaaaattcaaatcagagtgaagtgaatgagacactccagttttccttctactccgaattttagctcctcctttcaacattcaacaaatagtcttttttttttttttttttttttggggatggagtctccctctgttgcccaggctggagtgcagaggtgcgatctctgctcactacaagctctgcctcccgagttcaagtgattctcctggctcaccctcctgagctgggattacaggcgcctgccaccatgcctggctaattttgtgtttttagtggagacggggtttcaccatgttgtccaggatggtcttgatctcctgaccttgtgatccacccacctcagcctcccaaagtggtgggattacaggtgtgagccaccgcgtccagccagctttattattttttttaagctgtctttgtgtcaaaatgatagttcatgctcctcttgttaaaacctgcaggccgagcacagtggctcatgcctgtaatcccagcattttgggagaccaaggcggatggatcacctgaggtcaggagctcaagaccagcctggctaacatggtgaaacctcatctccacttaaaatacaaaaattgccggccgcggcggctcatgcctgtaatcccagcactttgggaggcctaggcgggtggatcacgacgtcaggaaatcgagaccatcctggctaacacgggtgaaaccccgtctctattaaaaaatagaaaaaattaggcgggcgtggtggtgagcgcctgtagtcccagctactcgagagcctgaggcaggagaatggcatgaacctggaaggtggagcttgcagtgagctgagatggtgccactgcactctaacctgggcgacagagtgagactccgtctcaaaaaaaaaaacaaaaaccaaaacttatccaggtgtggcggtgggcgcctgtgaggcaggcgaatctcttgaacccgggaggcggaggttgcagtgagccaagatcacaccattgcactccagcctgggaaacaagagtgaaattccatctcaaaaccaaattttcaaaaaaaaaacatgccgcttgagtactgtgtttttggtgttgtccaaggaaaattaaaacctgtagcatgaataatgtttgttttcatttcgaatcttgtgaatgtattaaatatatcgctcttaagagacggtgaagttcctatttcaagttttttttgttttgttttgtttttaagctgttttttaatacattaaatggtgctgagtaaaggaaataggcagggtgtgttgtgtggtgttttaactaggcgcttctctctcagagagttttgaaacctgtttacataaaggcccaagatgggaaggagatccaaacataagccaccagcctcattccaagtctcttctctttccaaccctggattttttttttttatttaacattgtttcttttagctttatttttcttataaaagaaatgtatcactataaaaaattacacactacagaaaaatattaagaagaaaaacattcacatcggaaacaaagttttttcccatgaaaacagaacccaaaagggtaagtggttagtatttcaccagcaattatgttgagaataaggccaggcgaggtggctcacgcctgtaatctcagcactttgggaggccagggcaggcagatcatctgaggtcaggagtttgagaccagcctggccaacatggtgaaaccctatctctactaaaaattaaaaaattagctgggtgtggtggcatgtacctgtaatcccagctattcaggaggctgaggcaggagaattgcttgaacctgggaggcggaggttgcagtgagctgagattgcaccattgcactctagcctgggcaacgagtgaaactccgtctcaaaagaaaaaaatatatatatatagagagagagagagagagaataccacagtgagggcatgggctagaaatcagtgcactaaggatatgaaatagatgtcaatgtgaacttttcggatactttgaccctgggtctttgtatcctcttcttagcacctcagtcccacgctctgctagtcattggcttcctgataccccttcaatacagactgagtatccctaatccaaaaatttcaaatccaaagcactccaaaatccaagagtccaacgtgacgccacaagtggaaagttccacatgcgagtacttaacacaaacttgtttcacgtgcaaaactggggaaaatattgcttacaattacctacagcctgtgtctataaggtgtttatgaaactggtgttatgatgtatatgttttctttttttgttcctggctcataactcccatagcccttgttacggatgtgagccaccttgcctggctgatttttaagttttttgtagagatggggtctcgctgtgttgccctggctggttttaactcctgggctcaagcgatcctcccaccttggcctcccaaagccctgggattacaggtgagattacaaccctcatttcagagaaggtcctaccccataccctgggggaaggaatggtgacatcataaagcctcgttaaaacccatgaggacagtggagagtgtcaggatagctgaactacgtgtagaggttcctggagggtggtgcgcccagggaggggacagaagctctgcgccccttatcccataccttggtgtacgcatctcttcatctgtatccttcgtaatatcctttatgataaaccaggtaggccgggcgtggtggctcacacatataatcccagcactttgggaggctgaggtaggaggattgcttcagcctgggagttcaagataacatcatagtgagatcctgtctctactagaaaaaaaaagaacaaccaggagtggtggcgcatgcttgcagtcccagctgttcagtttgcactccagcctgggagacagagcaagacctgctgtctcaaaaaaaaaagactggtaaacatttttcactgagttctgttagccactccagcaaattaaacccaaagcgaaggtggtgggaaccccaacttgaagctggttggtcagaagttctggagccctaaacttgctactggtgtgtgggtgggggcagtcttggggactgaggcctcaacctgcaggatctgatattatttccagaaagatggtgttggaagtgaattagaggatacctaattggtgttcactgcagaattgattgcttgctcgctctcgggaagaaatctacacatttggacacgaaagtgttctgggttggtattgtgttagtgtggaatctaga

SEQ ID NO: 41 - DNA, 645 bp, Homo sapiens
atgcggagatggtttcacccaaatatcactggtgtggaggcagaaaacctactgttgacaagaggagttgatggcagttttttggcaaggcctagtaaaagtaaccctggagacttcacactttccgttagaagaaatggagctgtcacccacatcaagattcagaacactggtgattactatgacctgtatggaggggagaaatttgccactttggctgagttggtccagtattacatggaacatcacgggcaattaaaagagaagaatggagatgtcattgagcttaaatatcctctgaactgtgcagatcctacctctgaaaggtggtttcatggacatctctctgggaaagaagcagagaaattattaactgaaaaaggaaaacatggtagttttcttgtacgagagagccagagccaccctggagattttgttctttctgtgcgcactggtgatgacaaaggggagagcaatgacggcaagtctaaagtgacccatgttatgattcgctgtcaggaactgaaatacgacgttggtggaggagaacggtttgattctttgacagatcttgtggaacattataagaagaatcctatggtggaaacattgggtacagtactacaactcaagcagcccctttga

SEQ ID NO: 42 - DNA, 44505 bp, Homo sapiens
ttggtaatggaacagagaaatacaaatatagaaacgtttttatcctttagatcttctaatggtgcagatatttcttaaccaatttcaagagtgccttattcaaaaacaaaaaacctgcacatagaaaaagcaaacatgtttttttaaaaaaagccctgtaaaagtggttaatctgtcgtctgattttcaatgtatgactttaatcaattgcatattccttaattctgcaaatgacaattaaaattaggaatcagtacctgaaaacgccatttatacttttgagtttatattagaaacacggttttgatgaaatacctttttcggttcaatctttttgaattgtgaccacaaccaatagctacacttagattctacagaattagtaggaaagatacaaatgagaaggtctttctagacaatggatctcactgaacatcatcttagtgtgtagactttttccactgcagtggcccacatgtgctatggtgacagacggcagttggcattaccacttatatagtaaaatatctttaagacaaaaataaaagttatttaaagaatacgctggccctgaaacatgagctgtgccttaaactacatatcctacctccatgagtgaatgaataagtgggttttccgcctgcatctatgtgttaagacctattgtttgcttgtattaattgtagtcctgggataaaagcacagaggtaactttcactgctgctttttgtactctctccaatgttttggaggaaaaataagcacaaacaatagcctagagaaactgaatcgatcatacttgttgcagcttcgacaaacgtcaattttgctgcattagaatgggaaacatttttcagtctattgaaatgaattacaaacgtttttaaatagaaaattagttaaaaaattggaggctgcttaatcgatagctttctctataaacatacttggatttcacaaataagtaataccgtaaaaatcttcttctccaaagaaaaatccccacaaataaatctattgatacctagtgacaagtggaaccagataaaaatggaatctataagaattaacctaattgacagcgctctggagctaatccatttccattagttatttgttcacagtaggtactcctaaggacttgttgaattgcgggcttggcgcccgttctacggagagttcacagccttcgtgagtggggacagaaggcggctcggcccggtgattcaggtcgaaattcaagctgaacagcctgctgagaggtgggatccaccatccggacagtggggggctttgggggtgctgtgagactgggctgcgacccaggtccagcagggagtgtgcggcacagaccacaaggtcggcgaggccccctaacccgcgcccggccgggaacccgcagaccagcgacggggcagctgcggggccaggagcgccccaagacgggcgggcgctgaacccgagcccctgccgccgccctggccccgaacttccgccctcccaggacctgtcccggccgccccgagcggtactcgaaggccggggccgagatgccaccttccgcaggccgcgggaaaggcgcgccgagtcctgcagctgctctcccggttcgggaaacgcgcggggcgggggcgtcgggcttgggacaggggaggataccagggccaccttccccaacccaggccgcgggggcccggcctccccgatgcagaccacagcgccctcacgggctgccctcaggccgcgcagcgggcagccgccagccgtcaccccggggagcgtccgtggggtgcccaggcaccccaccccggcccggggcgctcagacggcagcagactgctgggcggcgcggggactactttccaccgccccctcgcgccccgccccttgtcctcgcgcggcggaacgctccgcgctgcgccggtggcggcaggatacagcggcttctgcgcgacttataagagctccttgtgcggcgccattttaagcctctcggtctgtggcagcagcgttggcccggccccgggagcggagagcgaggggaggcggagacggaggaaggtctgaggagcagcttcagtccccgccgagccgccaccgcaggtcgaggacggtcggactcccgcggcgggaggagcctgttcccctgaggtgcttgggcgctcctttccttatccttccggggctgctcccgcttcctctcggagccaaacttcgtagcaggcgcgcggtccgggcggcgggctgggcgcagccgggaggcctggggttgggagcggggagctcaggtgggggacggtgagggtgggccgcgcccggggcgcggagggcggcggccgggcccgggttccggtcgcgctgcctctctggggccctgggggcatcgcttgcggggagggggcgccgcgggggcgcgtacaggagcccggatggcaggcggggtgggggtgggggtgggggtctgtggtttccgtccggggctctggccttggccgagtttgggggagggacccggtgcctcgggatgcgccgggccctgggtggggggcggggtggggacggggggctccgccttctcagctcttgcggcgagttggggttcgggcgctgaggcagagacgccaccctaagtcccatcagtcctggggatcggaccagtggactttctcttaagatttcctctttcattcttaagaatagaagtgttattattttttttaatgccctggctatgtgagtttgaatcgaagcaactttaaaccttagagcaactaaactctaagtgcagcgggtgcgatgcgtcagtagggtgagcacataaaaaatccatgtcttgcacctgtattttagcgtactatgcaggtgagtgaaagcagtggataatgtactgggagtcttatggatttatggtagtgggtatgagaccctggtgaaataagggggtggaggaaggcgaaggtgatggcttactgtttcttaccaagtgaactgcaggattcagcctctgactcagaccgcttcgagaattttgttcgtagaaataatttaaatttattcaaatagtttgatggcagctaaaattgaattatagagcacgttttcttttcagcggagtgaatttttccttcgctccaaagctggccaaatggaattcaagcattgcaacttctttcagtgttttgtctggagagaggactttgaaccgagacttttcgaagttaagttcctatagcctgcttctgaatctgccaagcttgaaagctttggcagttgggtgtatgtagttgttgccttcgttctcttcccttttggagggagcgttgtctcctactttgtatcttccagacatctgtggtcttccccccacccctcgagtttgtgagtggtgaatgaagaaagactaggctgctggtatgcagaggtcggcaaaaggaaatcgaggagtggttttagtgaaatgagagctttgtatcatgaataatggtggcttaggctagacatcaacttgaagagacggcagcatttcctttcataaagtctaggctaatgtttttcagatcgctaagttgtagtttgtctggaatttaggaagccatttcagtatttgtcacttggtgaacgaacattcaataccttcagatgtcttcgtgttgacttgtattcatcctaagaaatagtaaatatagtctcaagtgttatttatgttatactgctggtttattctctgcttaaattattgacataaatttctactttggaggcttttcgtttgaactaaggctgtgcggaatttattttacttttatatttaaatctttgaaaaatctctgattaaaaaaaaagtacccttaaaggtttgaggatgtcctttcacaccagacaaaatttggttaatttgcgcccaatattcattactttgacctaacctttgttctgaaggccgtgtacaaggacaaggccctgagattattgcaacagtaacttgaaaaactttcagaagtctattctgtaggattaaaggaatgctgagactattcaagtttgaagtcctgggggtggggaaaaataaaaaacctgtgctagaaagcttagtatagcatgtaactttagagtcctgtggagtcctgagtctcccacagaccagaacagtcatttaaaagttttcaggaaaaaccaacttaaaaaaaaataaggtggctaattaaaaaaaaatgaagcatttaacagtgttcaggtttcagagtatggaagaggggttttttaaactgttatctgattatttcttttaccaacatgatatagaaaagtgtatttccagtattaaaatttatcagactgagcttactgttcctgttaatgactggaataaaaattggcataaatgagggtctgtatgcttgttttaataacaccaccaccaagatagaaaacgaggaggcaagtttctccaagggtattttgaaatgtgttagcaaaactattgcagatactcgtttttgttatagggtgaggtggggagaggcgcatgctaagtattgttgaaactagggatgtagagaattaaaagtttgaatataattattttgtagttataagtagcagtgaaattaaatctcctgcaatagactatagaagtatatttagccaaatgaaacttcagtgttattgaaatgaaataatacatctgtcctgttacaagattatttttatttctcttgtggtttcctagcttctgataatcaataattgtagatgagtaggtggtaagttttaagtttgtactttgagcttagtcggaagcatgcttgactgccaacccggggcacaaaggatgaaggcttttagaactggacaaacttctaacaaaaggtatttgcaactcttttgtagtgtgtcatgttgatttgtgacattgtttttgaaaatatgtgttaacttagttttcttgtagccctctttttattggaactgtggtatctattgttgaaactgcttgactgagaacatttttataccataaaagtaaatagtaaacatagcccaggagcggcttctggtttgtccatcgtatgtagccattgcctccttgtactctcattgagaagatactgatttgcagattcagttgtccttctctaacagactatttatgtaatattgcagttgtgattgtgataggtaagtggaccagtcggttaaaataaatactcaggtttcacaaaaggaaaataatatgatttgtgttgatctaaatgagtataggagttaactcctatagtttttcatcacttaaactcaggggaaagttctttatttcctctgtttacttaagaatgctgcttttgtgtttcatgcaagactgagcttgactcagtttgaaacctaggctcatctgttgaggcctgaaccctgctgtccttgaagtatgcatataatttgcttccttcctaaggaaaaataagctcttgaaagataaagtcaatcacattaggaacccatttttagggtttagccacttttttttttttttttttttaactcatgggcatctcttctgttaagagacattccccactctccaagtttccctcaagcctgaagcagcagagtgagtagtgttggagcatgttttcattgcatgcttgggtcatgttgagtgccctccagtggatatagtataatgcttgtgatttttttttttttaattccaaacaagtttatgtgggatatatttaggaatagttctgatgagggagaatcaactaagaaacctttgatttctaaaataattaatatcattactgctaattaaaatacaggcttgagaaaatgtcttctcagccaatatttgcagtagaaaagtcgggaggttttttaaggtcactttgagtaggcagttctgcttaaatatatcataatgataaaccagaatctcagtatagtactttaggaggtaaaagatcataatattcagttatattgatgaattacagcaactgaaattctcagaaaaaaattaatgaaaatgtgaattgtcaatttgtctaaaatcattcacagagtaaaacataagtgctcaacttgattatattaggaaatagatagaaataaaggtaattgagccagtgtatgtgacctaaaatataatgcccttagtgaccatagggttggtctcatttgtacatagtggtgggccatgatgaactgtgttttgccctttgaatttttccttaaaaagctttctctaggctcctatgttcatggtttttctgttagtaatattattttctgaaaatccatgtttcaaatcagaatctaattagcaacaggaatgaagcttattctaaattagtttttggaagttaaacggtcagcatatggaaatttttcagggtttagatttttaaaaatttgtttttcagaatatgttgctggaatgaaaacgttagcgtagggacggaaaatgacacttaccagtgattgctttactttgcctgtggaattcagtgtaattttgtggaaacattggtatatgattttttactacttaagaaatgtattgctatagttagggtttttttttttttaaaggcaagaatgcctcaagtgctttatgtgaatgattatttcaggatggattaaatattcctccatcaaggaccatacttgtaaatcagtgatttccaagttggtgcttagtatttacagcatttactgtctataagcttctgttctgatttttcaagagttttctgagaaatgagagtaggcttaaaagttctttgaaaaattatgtacatacaacttactgaaaaaaattgctaccggggacttaatttgtctcttgaaatgggctacttgccttcattaatgtagcatactacaatttgatgttcaagatatgttactaagaataagatcgctttcagaagccttatataggattggtcttactacattgtagtgggaatggctactcaaatgtctccagggccagttaggtattgggtaaatgggaccatgcagactattaaaaattgaagtgcacatgaagcagccagtcataagcagctccagccactgtgtgggaatatagtttatgttgccagatcatctgatttctttcccctaagtgggaaatccagatcaatgtacatctcttgatttgcaagtgttggtgaacaaaattcatattttaagatgctgtattcagcacaaattaaatacacttatttgctgaatactgccagtttgtccctctgcagtagtaccatttgaagtacagtgttttcataatgattctgtgaaatgactggttctgtgaatgtacataatttagcagataacattgttaaattattaggtttgtatttatttaggcacttgggaaatgccttgtgtcaattgattatagattaggagcttaaaagcaagatttatattatcaacttatttgtgaagactgggaaacccacatttttaaagttaggaattaagatggccaggttcaaggaaaagggggagaagtaactttcttattactcaaccatcttaaatagagttctttaagtgtatttttaagaggtctcaaaacttaatctgaagggacgtcaaatgctggacaaattctgtgtatacaactcaagtcagcccccaattttactggtctttaaatcatgtcctttttaccagaagtttgcatttctaagctaaactattactgttagactagatccaaaacttaaaaacagtttaggtaattaaaaattaattgaatataaacgttttacttaaattaatggcaaatggctttttggccaatttaagtttatgtaggcagttaaatcgattttggttaaatcttttgctgctaacaaggtatttccagattttgaaaagtggggtggcctggtgcctgtagtaccagcactttgggaggctggggagggtggatcacctgaggtcaggagttcgagactagcctggccgacgtggtgaatacaaaaattagccaggcatggtggcaggtgcctgtgatcccagctgcttggaagtctgaagcatgagaattgcttgaacctgggaagcggaggttgcagtgagctgagatcacgccactgcactccagctggggcaacagagcgagactccatctcaagaaagaaaagtggggtgtttagtcttcaaactccgtgtttaagtgactggagtgaaaatgtaaatcataggccggtgttggtttaaaaagcatcatctgaaaataatgctgtagtctgcaattatttttattacgatacgatggtgtaaaatacaagcagatcagtgaaccattcatgaaacattaatcctaaaggcgtctcaccccaagtctatcccacaatctccatgagacttcgtggaaccactgtaaagtttcttgtgtaatatcccagaagtttcctacctctggtatcttttgaacttgttgaaaaggcttttccaccccctctttatgatggtttgaagagtgtgaacatctgaatgatgctggggtgaaactgcttcataacacttccattttctcccctatttatttccatatttttattttttcactaatatccccacggttttacttctgttttagtaattcacatgttgctggactaattctttttaactgacttgtaacagatatgttaaaccgtttaaaacttggggggtatttttaacctactttaagttagttcaagttaatcagtctacatggcatataaaccttatgattaataaatcttaaatgctggtagctgagttggaagccaaagacgtacaaaaaagctgaagtgttaggtttagtgtgataagcttctcttactaacagggttttgtaatagcagaaatagatatatgcatatatatgtgcatatatatagcataccttattggatgtccatataaaaatgtgtaagaagttaaatttactgcaaaatttcttgggagtgcaatttgaagatgatcttaagtggtgatagtagtttgctacactgggggatagttgttgcaaactgctcctaattttcctttactgtgaagtaaactgaacagctgtaatagggattaggaactgtactccctctctctcttttttaagtataattaagtggttttggggtaagggtgtagggagtgagtgtctttgaagttttgcatatactagatgaatgccacatgtataagggaggaacaagggattcttggaaatatttttcaatccaagtaactttggaggcttccaagtggagttcattcccctgtgtaggaaagtgctggggtagacccttaaattcctttctgagccattgaaagaatgtcctcaaacttcgcttatactttatagttcatttagatacaaaagttacaaactgaatgctatttaggaaacgtaatacactgacataccgctctttaaatagattataaatttagtatatcaattttctggcattttgctgaattttattgtttagttttcaagcccaactatcttgttactttgtatatcgtagttgtcccccgttgatcactgtttcctgcttaattgtgctgtcgtttttcctgggtcctgattcagagtgtcagcattctgttccccatagaataagaagaggctagaaagtttacagatgagatatctaggaatgccagaagatcaggggtcaccgttgaggcagagtaattaattatggttaaaatggtgttgctgataagtgggtgctgggaaataattaaaatttgattttttagaagaatacttctcatgcttgaagagcgccctcattatatgctaaagggcctcaggtttttccttattgccattatgctgcagattctattacatttgtctgaaaagatctaagacagaagggctgtttaataccttcccttttctcctgaacttcccctctcctctcccccatcaggagctaagtaggaaccccttcaccttgttaccatcagatttcatcaatggtctgtctttacaatgaaggaagtagtactgcattctgggcagaggccagtcctgaggcatgccttttcaaggacattgttactttagttacactggctcttctgttttaactcttatcccccagactctaatcctgttgctttttttggtccccatctcccacctttcatcatctgaaatccattcattgtaacttctggaactcagtcgttagaaaatcctttatattctcaatcttgtgaatgttcctttctttcttattccagctgtaacctagccttctccccaagaatgctacttcccttgcagctctctcaagtggtgaatttttcccttcttgcacaccttataacactgaactaggaggtgtgtggactaaatgtctgcttttgttccttattgtcacttcttgacctttattttccaaaacttcaagctttgactttcatgtgatcaaattataccacccactgcctgtctttatttcaagcacctgcaaaccttcctgggtcattcacatccttctttgttcacttcattagctcttggctcattgtcactgtctcttatttctgtcataattcttggtgacatcagtatctatgtagagcaatactagtgaagatgtggtctggtaactgttacctgtatgaattaagataaggagttatgccagaatataagtcacctgtgtcactaagtttactgtttagcttactttttttgtagcaagattttgatgaaggacgcaatatgttgatttacagtctggtacaaattttgatgtagaagatgcttccaatatcctggtctcttagttccttgatttcttctccagtgatcttattttctaccctaactcaactacatattcccattgtcatatcctagaatattttgtcttttatctgtaactctgctctcttcccccaatctcatttcaagcatcccactttctaattcctctagtaaatacgtcagttccaacagcccatcaatcccattgggacctacagtttatctatccaagcttttccctgttcctcaccctcacttctatacagctgaagtttcatactgaattataatcactttctcgtatacacgtttaacaatcttgtccctccctggcttcatgcccagtgatctcttgtatctatgaccatgtcctttatcttctcctctgtcactggatgaactgtagccttccaagataaggccactcagttcatttgtacagcagattccatcccctcttgctctcaagaatattactgtggtatctctcttttcttgtctctactggctctttccatgagcaaacatggtattatcccattacaaaaaaaattttttctccgtctctccttccactcaccacctcagtctctgcttctctttcccgcaaaataaccttgaaaaattgctttatgtactcccgttttcttttgaacccctgccagtgaccaccacgttataaatttgtagttgtcatctcacttaatctgttagtagtatttggcaccattgctacagttgcttgaaatgccttttcattggtttccaggccaccatgtctgttagcagcttttcctcttacttcactagcatttccttctttgttttttctgttatctttctgacctctgttggagtggctgaaggtttagtccttgaatctttttttgttgtgcatatttactccagtatcatagctttatacagatggtatttacatctgtttgctaacgatttccaaattggtatccttaaactggtatccagctattttttggtcagcattttggatgtctaagaagcttctcaaactaaactgacctcccggttttccccaaagctgcatcttagtcttttccgaaatgcaattctgtctttccagttacctagcttaaaagcttgcagttcttgactcatctttctctcataccacgtatctgaattctctctgcaaaaaattgtctgttctcccttcagaataaagtcacgtgtcattttatgatggggatacattcagaaatgcgtcattaggagataatcatggttgtgtgaacatcagagtatacatagacaaacctagatggtatagcctactacacatctaggctatatggtgtggccaattactatgatgaatactgtaggtaattgtaacataaaggtaggtatttttatctaaacgtattgaaacatagaaaaagtacagtaaaaaatatggtatcaaaaataaaaaatggtacaactgtataaggcagttgtgatgaatggagcttgcaggatatgttgctctgggtgagtcagcgagtgacgattgagggaacgtgaaagatgtgggacatcactgtacactactgtagactttataaacactgtacacttgggctacactacatttttgtaaggttttaaaagacttttttctataataaaccttaaattactgtcacttttttactttatgaattcttaattttttaaacgttttcactcttgtaataacacgtagcttaaaacatacattgtacagctgtacaaaaattttctttatatctttataagcttttttatatttttaaaattactttttaccttttagcttttttgttgaaaaactaagacatgggccaggcgcggtggctcacgcctgtaatcccagcactttgggaggctgaggcaggcggatcacgaggtcaggagataagagaccatcctggctaacatggtgaaaccccgtctctactaaaaatacaaaaaattagccgggcgtggtggcgggcacctgtagtccgagctacttgggaggctgaggcaggagaatggcgtgaacccaggaggcggagtttgcagtgagccgagatagcgccactgcactccagtctgggcgacagagcggaaactccgtctcaaaaaaaaacaaacaaaaaactaagacatgaacacattagcctaggcctacagagggtcaggatcatcagtatcactgtatttccatctccacatcttgtccttctggaatgtcttcagaggcagtaaacataaatggagctgccacctcctgtgataacagtgccttctggaatacctcttgaaggacctacctgtggctgttttatagttaactttttttttttaagaagtaacagaaggagtacactctaatgataaaaagtatagtaagtacataaacctgtaacaatcattatcattatcaagtgtcatgtactggacataactgtatatgctatactttttttttttgagatggcatctcactctgtcacccaggctggagtgcagtggtgcgaggatagctcactgtaacctcagactcctgggctcaagtgatcctcctacctcagcctcccaagtagctgggactacaccaggcaccccaccatgcctggctaattaaaaaaaattttttgtagagacagggtctcactctgttgccagggctggccttgaattcctggcatcaagtaatcctcccactttggcctcacaaagtgcgaggattacaggtaagagccaccatgtctggcccactgtacttttatacaactgaagcacagtaaacctactgtggtttcgtttacaccagcatcaccacaaacaccatgagtagaacattgtgctgcgacgttaacgatggctacaacatcactaggtgataggaatttttcagctccattataatcttatgagaccactgttgtatgtgcagttcatcatccactgaaatgtccttatgtgatgcatgtcttcatatccaaaaatattaatcatttctcactgaagccatgccatgccatgccatcttttgcctgtattattatttttcagcttttattttagattcagggtgtacatgtgcaggtttgttagaaagagtatatcgtatgatgctgaagtttgggatacagttgaaccagtcacccaggtagtgagcatagtactcaatagataacgttctaacattactcctccttccctccctgttcttgtctctgtctattgtatctttatgtccatgtgtaccaaatgtttagctcattcttgtgagaacatgtggcatttgattttgtttctgtgttaatttgcttacaataaatagtctccagctgcatccacattgctacaaaggacatgattttgttcttttttataggctgcatcatattccatggtgtataggtaccacattttcttgatccagtctaccgttcatgggcatttgggttgattgtatctttgctattatggatggcttttgcctatattattggaaaggccttctaactggtgtccctgcttacaccgttttcccccttaaatgtgttttcaacatggtagccagagtaaccctttttataacaataaatcgtgtaacttttttgttcagaaacttacagggcttaccatttcattcagtaaaagctcaagctcctgtatagtcagaccatatccttcatcacctgttacttttctcctctgactcttcagcctttttgtttttcctcaaactgatgaagccttcatggctgatgtcagatgttttgcccattgagatcttccttgttgactcagttgcacttggtcatatgattttcatttatttggggtatctaatcataatctgaaagttggctacttatttttacccctttgagggtccttgccctgtttttgtatccctgatagcgggacagccagatatctggaacttacaggtgttcaataaagttttgttgaatgaatattctggaatcacccaaccttttttttcccctccacttatttttcttctccctttcacggcctgaaagatgtcctatgtatatggttccacttatcactctcatcccagtttgtgatatactattccattatattactattattaatacaattccattgaacttgctcttgctgacttcaccactggacctacatgttggccaaatggatactttataattttagtcttgacccctgcctttggcacatttcttacctctagcacagcactgtccagtaatccacactttctgagacagtggaaatgttcagtatctgtgctgttcagttggtagcaaccagctacccatgcctattaaacatttgaaatgtggctgtgtgactagtggcaattatgttggagagtacagttttagaaactcctgtttttcttacatggcactacatttagtatcacaatctaattgtgcaagccagataggtaggagtcatctttattcctgttatttaatttttctcatctactatatccagttcatcacatcaacagcgcctgttgtttctacctcctaaatatttctttagtctaactactacttgtccctagtgccaccaccatctatcagctggaatattgctatagctgccttacaggtttcccttctttcctgttctcttctagttttttgaattttagtcagcacgagattttaaaaactcaaataagattgtgttattcacctgcttaaaacctttcatgactttcagtgtcacgtagaacagaaaacacttttcttaccaaaggctagagagctctacgtgatctggctatttttaacgtttcattgcactcacccttttcctctataatcaaactactctgatctcaagggttagttcttgaaagatgatcatgttctttaatgactttaggtttttgtgtgttattttctatttctgggatgtttattctctgttccttacatgctggcccttttgcatccttcttcaggtctcagcttacatgttaccttcaagaagcctttgaccactctaagtgggcccttccttccacttctgctgtgtaatcccactcccttctcccacttgttaattagttacatacttttttgtaattgtttatttggttgctgtctccctctcaagaatgcagggaccatgtctgcattctgcagtaatcactactgcacacccagaatctattacagatcctggcatgtagctgatgcataaatatttgttgaatgaaagtctgtacattgtatttatgctattggtattgctatgacctgaaactaaaaggagttgtggaaaagatttcttatggaacagaaatatcccttttgattaatatcacaatctcgtaaattgagaaaacaaaaaaatatatactactggagcattcatgtatagttggagattatgactcatttattggtgtgtttttggactcagaacaaagatgagggaatattccttaaagctctgtattgaaataacgaaaagcagtcacattttaataatagaagcttcctagcttactctttctgtaatcttcttttcctaaatgtaagagagcctcataattatgaggcttattactagagtaaggctgtcaaaggcagcaaaatgtctttctgtttggaagaataacataaacttgacatgtatggtgggggacagaaggtttcaaaagtttaagaatctgtgttgtcttaacaaatagatgcttctcaaggagcttacgctagtggttactctgtccagtcagggttttttcttctttaacttgggttcatttcctgatggcacacatgaagtttggatcatatggtttgactttagctatggtccttagctatggggagcagcatcagcgacctgtgacatgtaaattaaaaatacaatgccagggcccttccccagcccctctgatagagaacctcttggccatctgtatttttagatgttccaggttagtctgattaacacccttggttaagaaccattgggaggatctgattgccagtttaaggggaccttcaagcctgtaggtctttatagttaaaaaaaaaaaaagattttaaaaatcatgcatatgttgtggctgaattctggtttagcacatactgcttttaatggcctgaaatgtttttcccaaataaattgtcttgttatagctttcatgtgtgatttggtccagcttcttgttttgaagatacttacgggggggaacactttgtgatttctcttagtaacatattaacccacttaaaaaccctttctattacaggtcttcacatttaggcttaatgtgcttaattcaaatgtaaaaatacacctgcctttgttctcagtgaaagtatgtaataaataaatgaggggttggcaaactactgcccaccatctgtttttttatggcctatgaactaagaatcgttttggatagctaaaaaaaaaaatcaaaaggataattattttgtgacgtgaaaattatatgaaattcaaatttcagtttctgtgaatgaagttttaatggaacacagccatccatgcttatgtaagtgtgcatattctctggctgttttcactgcaatagcagagttgagtagttgtgacaaagagtttatggcccacaaaacctaaaatatttactttctgatgctttacagaaaaagtttcctgaaccttattctagctatatgttgttcataaatgaatctttcgtggttctgaaggcatttaagaatctcttaggttataaattggctgggcgcagtggctcacgcctgtaatcccagcactttgggaggccgaggctggtggatcacgagggcaggagttcaagatcagcctagccaagatggtgaaaccctgtctccattaaaaaaaaaaaaaaaaaaaaaaaaatagctggggttggtggtgggcagtaatcccagctactcgggaggctgaggcagagaattgcttaaacccaggaggcggaggatgcagtgagccaagatcgcgccactgcactccagcctgggcaacagagtgaaacaccatctcaaaaaaaaaaaaaaaaaaaaaacactcttaggttataaataattgttgttagctctccaagcctccatattacattttgtgtgttctcctgttcacattttgagcattttattttttattagcacattcagttcatcaggtatttaagagcttaatatatgccaaagcatatattaagcgagaagctgtttctaaatgtactgtctcagccctcacagagttcacttcattaggctctttaaaatttctttctttaaaaggtcagcgtgctggtatagtggggaagggaaactcttacaacacgtcgagtagaggaaggttatcattatgggatataatttggaagtcattgagtacctgccattaattctgcctgtagtctgaatgtagagattaacatgtagaaacttttttgaaataaaatcttcaatttctttggcatatctagtactgtctagctaggcatatagtcaaagtatggtgtatatttcaagtattaaaagtttttttgggctgtagtcactgttgaaaggatatagttctttactattacatgtgatacctttatataaaattggctaacccctgtctttcatttatctgcaacactgactgttaccagttgtctctaactttggtatggggggtggaaatatgattagattgaaagggtacatgactgagccacaagcagacctggatttgaattttaactgaacggtttattagctattcttacattaatactgctaatcagttttcttgtgatatgaggaatgatgtcttctttatgaggttgctaggaagattcaatgagataacatactaggctcagaactgaagttgctaggaatttaattatgctaccttgttaaagtatgtcaaaggcagaattcagtgtttagctgataccacaaggcagtatcctaaaattatgctgtaaaagatataaagatgctgtaagtgactcagaaacctagtgactttgtaatgcagttgattcttagaatactgtcactttaacagaataggagctaggaatgaagaaatagttattaaattactaaaatagaaaatttattgacacatgtaaagtgacatttgcttaaatattgaaaaatttgtagtactatttccttgctttagaaaacattggttaccactttttttatttatagcagtttgtttttgccttgaggcaagatggttgactgagtagttgccacatttcttttgtacaaagtccatttcataggccatctagcttttatgcttagaaacatttccttaacgttatatttcagtatttggctaacctatatagggttaaattatataggctaacttctcggacagatatttctaataatttatgtatttggttctgcaaatgtatgcaaaaatatatgtacaaaggtatgcagatgccttgcatacttgatatatgttaaattttttttaatgtagacctttttcgttctctttaatgactatatggtattccaccatcccccgctcacctggacaactacagtaacctcctaaatggtgtttctactttgctattgccccttattgtcttttttcccctttatagctgctggagtgaattttagaaagcctaagtcatacatcacattgcttcatgggcatcccagtacactttggattttattttacatccttactgatctgattctcatctctgtctcttcatggttctctgccttctagttacactggtgacctttcaaaacctttaccacattgagttcattccttacttttcactctttctctgcctggagtgttctgccccatctttacgtggccagctgctcctcctctgatgaaatgtctcttcctcacaggccttccctgaccacccactagagtagcacatcttctacctcataaacttgtttattagtatttcttactctaaattttcttttaaattgcttaattccctaacagtagaatataagcttcactgtatgtatgatcttgttgactctcttactcattgttattgtaataccagtaacaaagggtgtttaaaatttgttcagtgggtgaatatatgttccatttaatggataaattattttttattcagtctcctgttgatggacatttgaataatttccatctttttctctatgaatgcctcacttggcatgcttctgacagtattgccacagaatacatttctgttataaaaattgaatttttaagtcaaagggtagttacactttaatggatagtggcagcttactatcaaaagtttctgctagtttcaccatatccttattagcagtagatattatcaatcttttcaatctttgccaatctgataagcaaaaagtaaatgggtttaaacatcctttgtatatattcattgctcactttatgtttttcctttgaaatgttatttcttgttctttccctgcagtatgattctttctttttttgacttgttcccagttttttgtgtactatggatattagcctttaattatgttacggatgttctagtatgttattttttgaattacttcaaatgtgatttgttgctcagattttaaaaactacatacacaaattatctcatgtttccctttttggtttcaatttcgactcatgcttaatcagttcatcgattgggcatggttttattcttaatatatacccgtattttatctcattttatttttttacgtgtaaatatttggtgaatataggtttaattttaatgtaaaataaggatgaaaaatgatagttggaattacaagcccatttctcctaatacttttaatcaagtaatccactaattgaaatattaccttcttcatttatgaaattgccacattatatctgggtgtttttctgcctactacagtctcttacccatttctttcctaataatacaatacttgaattgctgtggttgttgatttataatgttatcttaatgataacattataaatgtgatggaactggttcctccttatagttcttcttaaatcaagaacaagacatatcttcccatttactctcgtatgtatctcattttactgttatgaatgaaatctgtcctatttgtgtataggaaaatagtttttgtatgtaattgtgatatggccagttttattaaaaatttggttaaactaagagttgttttctgttcagccttatcatactataaaatccacataaaatgggtataaaagtgtcgcaggacactgggctcagatgattctcccacctcagcttcccaagtagctgggactacagcggcatatgccaccacacccagccaatttttaaataagttttaaaaatagtatttttagtagagacagggtttcaccatgttgcccaggctggtcttgaactcctggactcagacaatccacctgccttggcttcccaaagtgttgggattacaggtgtgagccaccacaccttgccgaattgcagccatatttaatacttttttccatcctattccctttgctgcccccaggcctcctgtattgatagcccgctattaagaagctagtgtatattctttgcatacttttacttcataaactatatgaagcattgttctgttttttaacttaattggtataaaattatattttggaaattcagtatattctgtgaaaattatttagaaaatgtgcctctgagataaagcctattcaggatgtatcttaaaggagatagctgtgctttaacattatcagtctttttggctgcttatgttaatataagttggagaaaaacagtctgctttttgtgataatatgttcttggagatggagtgaaagattgtttaaaaacattgtcttttttttcccctgaagtaccagtatttattttaggattatgttactgatcaaagatgctgtgtggagttactcattggtgagactaacaataaatcacacatgcaaaggatgttaccataatctaattattttaaacagtaaaattatattctaagacatccagttggcctatatgtgctatatcaatgactatcaaggggctttttatgtatactgtatacatgtacttcacaaaaatataaaaggatgacatcaaaaatctggcaagccaaaagcctacattacatgtagcaaataaataagcatatgaacttattggaatttaaaaccctgtaggatgggcgggtgatggtatgtatgttagatgtgtggacatatctattaaaagttgtgtcagataacagctggtgctgacaagcccttggtaagatggcagcatgttcaatatgttctgtgaaaattatctcagtttatgatctgtcagtattgtggagctatgcatgaaaggacttaaaattcttacccttaaactcagtaacagtgtttctagaacttctggtgatatgggaaattaagagaattatttatatgcaaaggtgtttattgcagcattgttggaataatagacaaaatggggaagaacaagctcagaatggaggaggtagcttatagtatagacatacgatacaatccagatgataatattttataatagtcttcacaaggaattttatatttttatttttaaaaatacatagcagtgagtttaatataccaaacataccaaaatgtcatcatttactgtgtggtggactcatatgatggagatgataaataaaaatattaatttatttgaggcatatatttatggctgaggaaggaagacagttatgaagaacagctcattctggaaacatactaatttttcccagccataaagagatttcctatttcttttttttttccatttaccttctgtttcctacctgagaagatttcatacttctaataaccatttgtgtacctatttaaagacagtaccaaaggcatacattttagtgtttggaggaccaagggtcatttgatgtttgatgcttattgactattcgaggatgacaagacaccttgagaacacacacacccacacccacacccacaccctcacccacccaccccacccccctccccgaagaaagctgtgaaggaagaaagcagaaaagaacctggagtgagttgtaacttaaaatgttagtgttgcatgaagtgtgttaaaacaggaagatttgaggaaattgcatacattttctagatggcaaagtattactggtgacagttaatgaaaatgcatatgcatgtgtttttagatttacaaattttactaagaactttttaaaaatccctgaaggtgtatcaaaagtttatcatgcttatgaaatagagtagcactttctaactttaaaacggggaataattctttggatcttgattattggaaaagtgaattatgaattgctagtataaaactgtggttttaaaatatgtctgctttatatttttatgtagcagatttactcctagttaataatactcaaacttactgaaaactaaggtaattaagataattctgtcctgatgggaagaggaaaaataacttcagtgtgaaatctattatatattagttgtggcaagatttctcccattgactttgactggagacatttatagggttaaaatcggaaatagcacggtgaattttgaagtatccttgtagttggaaagagtattatgttcatattgccaaaaaaaagatgcatggatgcattagactggatggaaaatacatgagaagttggctagccccctctttgtcaaaacatcacttggtggtgataaagctgttggaaaacacagcattctaatgtagtctgtagtttaatgataatctgtgtcttgaaacatttagcgtagtacttatacaaacctagatggcatagtgtactgcatgcctagcctatatagtatagcctgttgcttctagggtgtaaagctgtatagcgtgttactataggcagttgaaacagtggtatttatgtatccttttttttttttttaaattcttttaagagacagggtcttgctctgttgcccaggctggatgcattggtgtgatcatagctcactataaccttgaactcctaagtgatcctctttgcctcagcctccccagtggctaggactacaggcacatactaccacacctggctaatttttaacatttttttgtagagatggaatttcgctgtgttgtccaggctggtcttggaactcttgtgctgcagcaatccacccgcctcccaaagtgttagaattacaagccacttcgcctggcttgtttacctaaacatagaaaagatccagtaaaaatacagaattaaaatcttgtggggccactgtagcatatgtagtccatcttgactgaaatgtccttatgcagtgcatgattgtacttcataatttttaagcactcctccctcttgattggtacttagtggattttatcatttttgtttcttcataattctttctgaaatgtctactggttggacctttgatctcctgaattgatcgtgatttcttctgttgtattttttgtctttgtcatttttttgtactctaggcagttttctcaattttagtttctattcaactttttgtttttatttattctctccagtatttatggagatactaaattgaagtgttctgtttctctctccaccctatccctagtttcaagttttatctcagtttctatggagtcagttttttcgttgctttaaaaaaaaattttcctgaagtgattggtaagttttggctaattgggagcactagaattgggcccttaatggttggcagggtgtggtggaggagagacagcccttagtccaaaggctcaggccagaaaaagaaagaggaaggctttccttttcctttccggagcagggttctgccctaggtcttgcttggcagtctatttgatttctttagcagttaatgctcagttttttggcatatgtggatctgcctccagagcaggtacaaggtgagtgagtctatgctgttacctaattagatccccatttctaccctttgtttttacttctctatctactgataggtttttaccctccttcacctcatagggttgcagtgaagagcaagatgaatttttatttatgttgcataaattttaaaagctaaaaaatatatatgtaatgttgggaagtcccagtgtacaaatggctattgtaaatttggaacatgaacttgcttttttccattgtaaaaatgaaatcattataaattgcggtcaagttactaggtcagcccacacagagtttacccagtaatatgcgtaaatgttttgcctttgcatcaacaacaaggaaaaacagtactataaaaaaatgttcctggaagccggatgtatcaaagcacttctgaaatagctatatagcctatagacatgaccagttggtttctgagtctgttgacattggccaaaggagaagctcagtgtagaacatgtttggagtctccttttgcagaaatacattggaggctggagtggggaaccaatttttcagaaaggtggtgaagtagttacatagccactcttttaaagacagtcaaaagatagaaactaaggccaggtgttggctcacatctgagataggaaaatcacttgaacctgggaggcggaggttgcagtgagcccagtatgcacctctgcactccagcctggtttggcaagagaccaaaactctgtctcaaaaaaaaacaaaacatagttcacacttaaatattttattccatatctttacatacccaatatgttaatttatagttcaagatgaacttgtttgggacagattttgtaataaaggaaatcgtgttattagaaatatctagaggccatgagcccttaaactgttctaatttgcaagtagttccctgtgtgatgcagtttttttcaatattgcacaataaaggcaaaatacggacaaattagatgataagatttatataaatttttaaaatattgatcaaaatatgtatccatattggtaatatttgtatttataataaatcattgctgtaaatttgaacttagaaaaattttactaataaaggtgcttttgtgttgcaaactttcatttgaaaagtaatttttctttgtaccaaaaaatctaaaattcgctattctagtcaccaaaatttgctttatgaaaaataatttttgatggcactatatcagaaaacaacttgttaaagaaaatgtggagtttttaaaatcccactgtacctctgttatccaaaggggatctgtgaatttttctgtgaaaggttaaaaaaggagagacctttaggaattcagagagcagctgatttttgaatagtgttttcccctccctggcttttattattacaactctgtgctttttcatcaccatcctgaatatctataattaatatttatactattaataaaaagacatttttggtaaggaggagttttcactgaagttcagcagtgatggagctgtggttgaggtgtctggaggagaccatgaggtctgcgtttcactaacctggtaaaagaggatatgggttttttttgtgggtgtaatagtgacatttaacaggtatcccagtgacttaggagtattaatcaagctaaatttaaatcctaatgacttttgattaactttttttagggtatttgaagtataccatacaactgttttgaaaatccagcgtggacaatggctactcaaggtttgtgtcattaaatctttagttactgaattggggctctgcttcgttgccattaagccagtctggctgagatccccctgctttcctctctccctgcttacttgtcaggctaccttttgctccattttctgctcactcctcctaatggcttggtgaaatagcaaacaagccaccagcaggaatctagtctggatgactgcttctggagcctggatgcagtaccattcttccactgattcagtgagtaactgttaggtggttccctaagggattaggtatttcatcactgagctaaccctggctatcattctgcttttcttggctgtctttcagatttgactttatttctaaaaatatttcaatgggtcatatcacagattctttttttttaaattaaagtaacatttccaatctactaatgctaatactgtttcgtatttatagctgatttgatggagttggacatggccatggaaccagacagaaaagcggctgttagtcactggcagcaacagtcttacctggactctggaatccattctggtgccactaccacagctccttctctgagtggtaaaggcaatcctgaggaagaggatgtggatacctcccaagtcctgtatgagtgggaacagggattttctcagtccttcactcaagaacaagtagctggtaagagtattatttttcattgccttactgaaagtcagaatgcagttttgagaactaaaaagttagtgtataatagtttaaataaaatgttgtggtgaagaaaagagagtaatagcaatgtcacttttaccatttaggatagcaaatacttaggtaaatgctgaactgtggatagtgagtgttgaattaaccttttccagatattgatggacagtatgcaatgactcgagctcagagggtacgagctgctatgttccctgagacattagatgagggcatgcagatcccatctacacagtttgatgctgctcatcccactaatgtccagcgtttggctgaaccatcacagatgctgaaacatgcagttgtaaacttgattaactatcaagatgatgcagaacttgccacacgtgcaatccctgaactgacaaaactgctaaatgacgaggaccaggtaagcaatgacatagctagctttttagtctgctttgaagtaaatgctcaaggggagtagtttcagaatgtctacccaataccagtacttgaaaactaacgatgtttctgaattcctgtattacaggtggtggttaataaggctgcagttatggtccatcagctttctaaaaaggaagcttccagacacgctatcatgcgttctcctcagatggtgtctgctattgtacgtaccatgcagaatacaaatgatgtagaaacagctcgttgtaccgctgggaccttgcataacctttcccatcatcgtgagggcttactggccatctttaagtctggaggcattcctgccctggtgaaaatgcttgggtaagaaaacatgtcagaatgcttgaagctaaaaagtagaagagtatactcacaatatttctgatgaggcttttttcttcttcccagttcaccagtggattctgtgttgttttatgccattacaactctccacaaccttttattacatcaagaaggagctaaaatggcagtgcgtttagctggtgggctgcagaaaatggttgccttgctcaacaaaacaaatgttaaattcttggctattacgacagactgccttcaaattttagcttatggcaaccaagaaagcaaggtaagagaattattctttatgtggttttcatggagcattggacacctccagtgtcatgtcattccatgcagtgttcctaacctttttggcaccagggaccagtttcgtggaaaacagtttttccatgaatgggttgtgggaatggtttctggatgacaccattccacctcagataatcaggcattagattctcatagggagcgtgcagcctagatccctcgcatgtgcagtccacactagggtttctactcctatgagactctcatggtgcagttgatctgacaggaggtagagctcaagccaggtaatgctcgctcacctgccacttacctcctgctgtgcagcccagttcatttctgttcttttaaatttttgagtttccatatgtaaagcactatgcgaagtagtagggatatggtaggcaagcttctcttcacacttttgttcttaggtgggatgtagatgttgggaataataacctaatatttaatttgtgtagtgggaagaagtggggctatgagggcacataacacaagttgaaactgactctttttgagggttcaaggagacctcttggaggaagtgatagttgagttcagtgttcaaggatgagaagggattcactaggtgaaggttaggtgagaaaacaacatctttgaaacgaaggaaggagatggaaagttttgggaatttaagaaatactaatagtaaggaggaagaaaggtttgaggtgaggctattgagatagacttagcagatctcatagggctttgtagagcatgtttaaaagcacaatgggaaatttcagcagaagcctgaaatgatgaaatttgtttttagaaaattggggcagtgttgaaagggaagatatacagggaatgaaaggacaagcatgaatgatcattttatggtatctgtttttaaggtggatataattaggaaaattaaagggccaaatgatgaggagttaagtgccagttctggttcaaattttcagtgaatcagttttgatataactttcatcttagggcattactcttgcctaccaacatagtttctaaatttttttcttttggtgtgatcactgtgggaagaaggaaattgggcccaaactgatacattgtttggaggactgggatgtctgaatttgagtggaatgctttaaaaggacaagttggatagggccccagtatgggggtctgagtgatggggtccaggaatacatttaggtccaatggcaagctggctgaaattcttgtataataaaataggttggtaatatggctcttctcagacatgtgatcaagattccttgactaacaagatatatatatatatctttctagctcatcatactggctagtggtggaccccaagctttagtaaatataatgaggacctatacttacgaaaaactactgtggaccacaagcagagtgctgaaggtgctatctgtctgctctagtaataagccggctattgtagaagctggtaagtatatgtatctattctgagtcttgtgtatagcatctgcagttctaattagattacttttcttaggaaaaggtggtagaactttaactactgaaaataaatggtcctattcagtttgcagccaagatttacattcagagtacctgtcatctggattgtagctaaatatttaaggctagtttaggtagagttcttattatccatcaaaaatgatggcatatgttttgcttaataaaatttgtttgtaatttcagttttgagtaaacctaagatttgctaacagagctgtgaatttataggagaaaagacaaattctaatatagtacagttttatgtaaagtgattgctttattagtagatgctcatgagcagtttttgttttgttttaacttttaggttccgggtaatgtgcaggcttgttatataggtaaattgcatgtcacaggggtttcgtgtgcagattattttgtcacccaggcagtaagtattgtacccaataggtagtttttcagttctttacctcccacccgtaagtaggccccagtgtctgttgttcccttctttgtgcccgtgtgtactcagtgtttacctcccacttataagtgagaacatgtggtatttggttttctattcctatgttagtttgcttaggataatggcctccagctccatccatgttgctgaggaagacatcttggtatttttttatggctgcttagtattccatagtatatatgtaccacattttctttatctagtctaccattgatgggcatttaggttaattccatatctttgctattgtgaataatgctgcagtgaacatatgcatgcatgtgtctttatggtaaaaagatttctttttctttgggcatatacctaataataggattgctggattgaatggtaattctgtcaggttttttgagaaatcaccaaattgctttccacaatggctgaactaatttactttcccaccagcagtgtataagcattctcttttctcagcaacctcaccagcatctgtcattttttgactttttattagtagccattctaactggtgtgagacggtatctcattgtggttttgatttgcatttctctaatgatcagtgatgtcgagcttttcttcatatgtttcttggccacttgtatgtcttcttttgaaaagtgtctgttcatgtcctttgcccactttttaatggggttgttcttttttgcttgttaatttaagtttattgtaaactctggatattagacctttgtcagatgcatagtttgccagtactttctcccatgccagtactttctcccattctgtaggttgtctgtttactctgttgatttcttttgctgcgcagaagctctttatactgtcccatttgtcagtttttgtttttgttgcaacttctcttggcatcttcgtcatgaaatctttgccaggtcttatgtccagaatggtatttcctaggttatcttgcagagtttttacagttttaagttttatatttaagtctttaatccattctgagttgatttttgtacatcatgtaaggatggggtgcagtttcaatcttggatgtggctagccagttatcccagcaccatttattgaatagggagtcctttccccattgcttgtttttgtttacttgttaggtgtgcggcctaacttctgggctttcttttctgttccattggtctctgtgtctgtttgtataccagtaccatgctgtgattgtaaccttgtattaacagtatagcttgaagttgggtaaagtgattcctccagttttgttctttttgcttaggattgccttggctattcaggctcttttttgggttcatatgaatttttaaatagtttttttttaattatgtgaagaatgccattggtagtttggtaggaatagcattgaatctgtgaattgctttgggctgtatggccattttaacaatattgattcttcctgccatgaaatagaatgttttttcatttgttggtgtcatctctgatttctttgagcagtgttttttgtaattctcattgtagagatctttcacctccctggttagttgtattcctaggtattttattctttttgtggctttggtaaatgggattgcattcttgatttggcttgcagcttggatgttgttggtgtctagaaatgcttctgacttttgtacattgatttttatatcctgaaactttgctgaagtttattggatcaaggagcttttgggcagagattatggggttttctaggtatagaatcatattgtttgcaaacagacttcctatttggatgcattttctttctcttgcctgattatgagcagtgttttgccctgatattctgtattctcagtgaatagatgtcgtctaagtatgagaaacaatttttttctattctgagtatttttaagaaggcaacttatatgtggtactttgtatattgtgtatgttggcaattggggaaaagaatagatggtttgtactagggcctcttgggttctgtgtgtgtgtgtgtgtgtgtgtgtgtgtgtcatgaaaacagttactttttagctaccaagcattttttctcctttcagtaacccacctaacaacatttactcagaatttcaaagcaagcttcaaatcagtattgaaagaaggaaaaatataaaggcatttaatggaagaaaatgttgggaataaagtatagggctggcaacacttacttttctcacttattgagagtaattttacttgggaatttatgagagagaaagacattatgattgctccaggtaactactggcagaggaaccatagtcttggggatagacaaatgtggctgagttcatatagaatgaggggatgggatgtaaattctgtcagctgttccagcagtaacctgtaatgtaggctaaaaatacagattttgagatttatttaatcagaatccctggagtgttaatttttatatcaagatctcatagtgttttatttgaagtgacagggaggtctgtagatagctggacatgtatgggactggaagcttaggaatctttaagttcttccaggttattcttatgttcatttgtttattctgaaaatagcatctaatgtattttaagaaatggaataggcacatagtatacattgggtaacacaacagatagggtccccgtgcttaattcttagtcttgtgaaggtgacaaaaatacttaaaaatatgtgatcctaaattagaatgagtgttatgggagaaatgacagcaaatagtgatgagaattaatggggaggggaattgtctagatgagagggaaaaggtctccttgaaaaggggatgttaagtgggactgcaggatgagagggaaccgtctcttgtctatatgagaagtgagggttaaacgttttccaggtagagaaaaggaacaccatgtgctatgtcttagaaccagggatatccagtcttttggcttccctgggccacattggaagaagaataattgtcttgggctacacaccaaatacactaatgatagctgatgagctaaaacaaaaaaaaattgcaaaagaatctcataatgtttaagaaagtttacgaatttgtgttgggctacattcagagctgtcctaggccatgtggcccatgggctgcaggttggacaagcttgccttagaaggaaagagattggtcaggcacggtggctcacgcctgtaattccagcactttgggaggctgaggtgggcggatcatgaggtcaggagatcgagaccagcctggctaacacagtgaaaccccatctctactaaaaatacaaaaagttagccgggcgtggtggcaggcgcctgtagtcccagctacttgggaggctgaggcaggagaatggtgtgaacccgggaggcggagcttgcagtgagctgagatagcgccactgcacttcagcctgggcgacagagtgagactctatctcaaaaaaaaaaaaaagggaaagagattgtggagatccaggtgctgaagagaaggtctgcataaacagaacttagtaatgaggtggatggcctggtatgaggttgaggttaggtaagcagagccataacatgcaggactttctaggttcctataagatagttactactcatggagtttattcatgctttattccagctttggagccatagatacagaatactttggtcagtttggaaggctaggtgggatccaaattctaaacggttcctcagggttatactaaagtatttctattatcttaaaaggatgctgagacactttcgatggttgtttatcaatagcaaagcatcacagtggtgtgtttaaaatattaataatagcattgtatagattaacagtttgaatgaccaaaagctagaagaccagactactgagatgttacaggcttttaggaatgaaatagtttgcttttagaactcaatagcaaagggcagatgtctgagatgcctgaaagaatcatagaatgtaataatataggagctaagggagcaaccaaaaacggtttgtggaggggacaacattggtaccatgaagataaatggaaccctcagaaggcatccttaatttttgaacataataatttaagaagctgacttaaagtgacttaaaaggtcagtaggtagctggaaatgtatgatactagaatgcaagagaggcaggctagagatttggaagtttccctcttagtatataggggtaagggcagcagggaaggggaggtagaggtgccacagagtcatctgtatgggacttttttttttaccctagaactgctgaatcagaatgtgtgtgttttaaagtctctgtaggccattctgatggacatctggggttaaaatccattctcttagagttaatagttatgtaaagggagggaatgaagtcttaaagaggggaaagaaggtagtcatttcacaaatactgagcatcctgatcatcagtcttacgcagatcattctattagtagctggagctactatgaaaaaggaacccaacagaggtgatctttgtcttgtagggaaagtggagtaacttacactatgaaggagaagtgcagggtaccataagaattacagcagatagacctcatctgaggaaataaaacagacccgaaagatgaaggagacaaggaaaagtatctcttactgcattcagaagtgatttaagttgaagatggatgagcgaagttaatctactatgtgggcattgggcttccatttatactcctttgccagagtaaatgtcccccatttaagggtcctaaaggatggaagattgtaaaccttggaacacatgttttgtagtcagtgaattgtataaagtccctgacagtaagtgttttcatgccgtctttctggattgttcttaccccaggaatttacctagcttctttaggtctttagtcagatgtcaccttcacagtgaggtgacctaattatctatttaaaatcgcagccccactccattatttttctccatagccctttaatatcatctgacatactgtatggttttagtttattgtatatttttctgcctcttccaactagatcataaattctgagggtaggaacttctgaatatttttgttcactggtctatctgcagctcagaacaggacctggtactgaataaatatttttgaaatgattgaatggatgaaaagaaatgagtaataagaatattacctaagggggacagtggagataacaaaggctttttcggcttaggaaaggaacagtagctatttgagagtttgtcactagtgaggtgaactggcaaagtgaaggaaactgagcaacattctagaaaatgagaggaaatcaaatacttaggtgaaaggaagtaaactctggaaatacagaaggacacctcctaaggctagaaaagatatttaggattgataggcacttctagctaatgactagggccttatatcctttttaattttctaggtggaatgcaagctttaggacttcacctgacagatccaagtcaacgtcttgttcagaactgtctttggactctcaggaatctttcagatgctgcaactaaacaggtaaattctgagtaaactggtgccatgggaatagagtcaagatgagtatgtgcttgtactgaccatctgtttttatctccataggaagggatggaaggtctccttgggactcttgttcagcttctgggttcagatgatataaatgtggtcacctgtgcagctggaattctttctaacctcacttgcaataattataagaacaagatgatggtctgccaagtgggtggtatagaggctcttgtgcgtactgtccttcgggctggtgacagggaagacatcactgagcctgccatctgtgctcttcgtcatctgaccagccgacaccaagaagcagagatggcccagaatgcagttcgccttcactatggactaccagttgtggttaagctcttacacccaccatcccactggcctctgataaaggtaaattgtcaaagtagaatttacctttgttgcagaattgaaaatgaagcatctctagctgttggatggctgtctaagcatagtgatcaataagtaggaattgtattccttagtaagtaggaagtatggctgcgataggggtaagattctgaaatgtttgtgtagtcagaactacttttagttgataccaatagatttagtgtggtgggaattttagggtaagaaaatgattttgttgagttgtatgccagttcttccttctgtttttcaggctactgttggattgattcgaaatcttgccctttgtcccgcaaatcatgcacctttgcgtgagcagggtgccattccacgactagttcagttgcttgttcgtgcacatcaggatacccagcgccgtacgtccatgggtgggacacagcagcaatttgtggtaggtaaattcttacagtgatacctggctatctaaaaggaatgcataaatccaaaggatcctgaacttctttctttggtcattggttccccccatccgtcttcctgaagagctaatgacaaagtaaataaataaataattacacatttctatggctgcagagaaaataaggcatagtgtggccccagtgatatttccttggacacgtccttcacatggtcagtcttacaaaggttgggttaggtgtttcataaagtgttctcatttaatttacacaaaggcccacttccttaggaagaggtagagtcataatttgagatcaaatctgtgtaatttcagagcctcttacccttgcctcatcatgcattttgactataaatatttagcagtccgttttattatcttttctgtgagttaaacttttttcatggacctaagaatattcagaaataagtagtagcatttctgtactcttaaccacaaaaatctcaacctgaagctttgatacaaagtttgtgtcttaaaagtagcttcattaaaagtatagtctaatgacatttctgatttctcagactttaagaccttattaggttagtttagaaaacaaagatggagcctaccagaacagatgttaggaatctcattttgctggttgctttgtgtatgtactcatattggggctttggctttcttcatttattactgttggtattggcccatctccatgaggtgacttaatagaacgttgagggcaccttttattttaaatctcttttctaggaagaagagagtttttgtgtccttgtaagaatcaagttatttataaaagctgctaaatgtagcagaataataaccccttttaaaactcaaatccagaaacaggagaaacagatggtacttacatattgcaaaagctatcttccttctatacatgaggctgtcagctgaatagtcttggaagagtgaggagtgaatttttctgctggcaactcggttagttttagcagttggtgctaaaacttggcaaagttttcaccaaatacatggaagatatacaaaaatagagggggcatgtaaaagaaaaacgttgacatagtctgagcattactttctcatcttctctttttatataccttttacccagaatgattggtgcccttactgtaggaaagttgtctttgggattcagcgctgtatggaagctctgttgcactgtgtatgggggaggggtgctgctttgaattagtgctgccaggaggcctcttttcagtgacattcaagttaatggaatccttcttccttcctgaactaattgcaagttacggggaacttcgggtatataatgtaaataattacagtctaataattgttcctcaaactttacagaggagaatgccctgtttgttaaccatgtttcttttggcaggagggggtccgcatggaagaaatagttgaaggttgtaccggagcccttcacatcctagctcgggatgttcacaaccgaattgttatcagaggactaaataccattccattgtttgtgcaggtatgttttaagtgaagtgttctaggttttatgtccataaaatttccagattgtaatgactaataacatttcagaaaattagggaccataatagggttaccaacatttaattttatgaaaattccctacattttttggtcagtaagagaaacattgagacttgagaagagggaggagatttcacatttcacttttatgggtgcctagaggggagagctgacctgggctgccagaggcagggcatagacccccaaccaattctgggttttccaaatcttagatcagttagagctgcctctgaagaaagggtttatagctaaaaaatattatggaaatccagtgctccagagcattaaacaccccaagacataaaattcagagaatattatttactacagtgtgaatgcctcttgcactctgaattgggaatgtttgcaccacagtggggggcttgccatgttttagctttagatttaattaggttttgtttgtgttttctccttagctgctttattctcccattgaaaacatccaaagagtagctgcaggggtcctctgtgaacttgctcaggacaaggaagctgcagaagctattgaagctgagggagccacagctcctctgacagagttacttcactctaggaatgaaggtgtgggtaagtaaaaaggaaccaaagcctttagcagatgtgtacattgaagtctcagtttttcctcaagggcctttttctccttgtctcttagcgacatatgcagctgctgttttgttccgaatgtctgaggacaagccacaagattacaagaaacggctttcagttgagctgaccagctctctcttcagaacagagccaatggcttggaatgaggtagggaaatgtgagcagttatttatctggtagtttcctagagcaggtatggcagcttgttctttcctctcaaaacacttagtacacattcatttgcattgatgtttccctggcttgagtatttcttctttatgctgtctagcaactgctctgaggaagaactataatacaagctttaaagagtctgttcagaatcattacaaataagttgtgttatttaaaattataattcataagggagaaagatgaaaaatgttaccagattaaagaagatttttcaaaaggatgtaaggaaagaggcagtgttaaacactgttaagaggacagtttatcagtattttttactaaactttaataaaacttttctatttgaatttctgctatgaatttttcttcagcatttgtcctcagtactacaggtggttccttgaaacattgtttctaataaaactagaacatcctgatattttatccattctatagagatcattgatggtacacagacatacagtggattatgtttgttgagtgaatggaaagagagattgttaggtttacaacgatgcagctcttgagaccggagtttaagatcagcctgggcaacatagtgaaaccccatctttagctgggcatggagatggatgcctatagtcctagctactggggagacgggggcaggaggattgcttgaacccaggagttaacagactgcactcagtgacagagccagactccaacacaaaaaaaaaaaaaaaaaaaaagcaaattaccagtgagtagtgtgttacttgggtttttaataggcatcttattaacatgttccaacttgagcccttaactttctccacctacccccttccacaaacctgttttcactgtcttctctgtcttagttaatgtcagctttgtctgtccagctgctcaggctaaaacttttctttcatataacacatcctatcagcagctcctgtttgtgggtaggcattttgcctttttttttttttttttttttaaactgctatatctctagcatgtagaacagtgcctggcagcacataataggtgcttaatataatatttgttgaaagaacaagtcagtgagtatttttaatgtgaggtgcaaagagaaaaaaaaatgtatctttgaggtgtggagttttgaagaacttccattttctaagcatttgtgtaatgttggagttacttgttccttttgtaatctgaaagtatgctttaaaaaaaattagtgtacttttgagaattttcattttgctttctattcttccttgctttgtgcatgtttatctagactgctgatcttggacttgatattggtgcccagggagaaccccttggatatcgccaggatggtatgtgtctcatatttctcgattaactccagatcaagctaaagttctaaaacttttatcagaagagccggtttgctcatctgggaaaccagtgttggcagaaaagtagtggcttcaattaaaagcagttcttaaattccagtcagcaacagtatctttaatggagcacagggaattcagagccacacaatgagtagcagtaggattacaccaccaacaaatacatgctactgctaggcctctgcagtgcaggatgttacaatttacctggctttttattctctttttggccagaggactcataatacctttgtctacaagctacccaaggaagataggaaaactcctgtttctaggctcagatctcgggtgggtttttacatagttgcattatcatcagggttttcttgaaaagctaatttaaatctgggtaatgaacatggaggatggcatagaccactaacaattataactgtcttacatttataaccgcatctgcttctacctaattatgaaaccactaaagcgcagattcttactgtgagaaataacatgtcaaccctaagataaaatatgttgaggtttcatggaaatagtgcctttccttagtacttttgtgggtgtcacttggcctttttgtcaagatagattacacctgccagacctcattattgtcttaatcctccttcccatgacttctcactgcctaggtggtcacacagtagattcctgcttcttctcctcgggaaccccaagtctcttgacaggggtaaatgcagagtgttcagggttagactaatgatgtgactaggccctgctggtgtgcctgtctgatggaaatagatgttatttgtgtagtctcatgggtggcctggcactgagtaattacttggctaaagaaagctggaggttgaagaggctagaaagcgttgttttctgacaagtttgctgctgaactttggatgccctaacctcagtgttaacgtctatgtctgcttctctcctctctcttttgccttccttcttgcctattttgttgacaccctgactcttctagatcctagctatcgttcttttcactctggtggatatggccaggatgccttgggtatggaccccatgatggaacatgagatgggtggccaccaccctggtgctgactatccagttgatgggctgccagatctggggcatgcccaggacctcatggatgggctgcctccaggtgacagcaatcagctggcctggtttgatactgacctgtaaatcatcctttaggtaagaagttttaaaaagccagtttgggtaaaatacttttactctgcctacagaacttcagaaagacttggttggtagggtgggagtggtttaggctatttgtaaatctgccacaaaaacaggtatatactttgaaaggagatgtcttggaacattggaatgttctcagatttctggttgttatgtgatcatgtgtggaagttattaactttaatgttttttgccacagcttttgcaacttaatactcaaatgagtaacatttgctgttttaaacattaatagcagcctttctctctttatacagctgtattgtctgaacttgcattgtgattggcctgtagagttgctgagagggctcgaggggtgggctggtatctcagaaagtgcctgacacactaaccaagctgagtttcctatgggaacaattgaagtaaactttttgttctggtcctttttggtcgaggagtaacaatacaaatggattttgggagtgactcaagaagtgaagaatgcacaagaatggatcacaagatggaatttatcaaaccctagccttgcttgttaaatttttttttttttttttttaagaatatctgtaatggtactgactttgcttgctttgaagtagctctttttttttttttttttttttttttgcagtaactgttttttaagtctctcgtagtgttaagttatagtgaatactgctacagcaatttctaatttttaagaattgagtaatggtgtagaacactaattaattcataatcactctaattaattgtaatctgaataaagtgtaacaattgtgtagcctttttgtataaaatagacaaatagaaaatggtccaattagtttcctttttaatatgcttaaaataagcaggtggatctatttcatgtttttgatcaaaaactatttgggatatgtatgggtagggtaaatcagtaagaggtgttatttggaaccttgttttggacagtttaccagttgccttttatcccaaagttgttgtaacctgctgtgatacgatgcttcaagagaaaatgcggttataaaaaatggttcagaattaaacttttaattcattcgattgtgtcactctttctttttttcttgtcattaataaatggtttgtgagggtggtaagtaagtttatccaactcaactttatcctgaactttatcctgagatagatagatagatacatagtgaagtaatttgttgtagcgatagagagggccctactacttctctagatgcaatttgccaagtttctttagcatttggccctggattacgctggacccctaaaaaagtgtttgtttcagccttgcacattgtgattagttctgggctttggtgggagaaagccaagcagactatccatctatctatctctaccccaatccccctcagatgatttgattccattaaagtaaagtaatgaaataaatagtaactacccctacctggatttggatttgaatcaccttcacccaagtgtgactcattgggagaggggaattccttcaactggactttgaactaataataattaaataaattaaataggtttaagtgttgatgtttatctgaacataatcagaaccagaatgagccttccacagtacctgccagatgatcctatcaatcatcccggtggtaggtctgacaagcttagttcatctcatctcttcaggtagacctgtttgttaagacttgtgttttggtcttttaaaaagtaaaagaaagaagtgttttgtctttagggagagctctttctgatttactgtttttattttgatgatgattgatagtgactattaattatgagaaaaacatacattcagttctttttcgttaaaaatcagcttcatctggggaggcctttttgtgaatgcccttgctttgcaaaaatgaattcattgtggtctaaaatgtaattagggtttgaaaagaaacattcacatagctgatgatgtggtaggtctcaggttctgtctcatgtgtgataaaccaaaccagccagtatttcaagaagcctagggctattggtaggttaacaccgtgaagatcttcagtgaattcagcttttaacataaagagccaccgcacggtgtttcaattacagaaagaacaactttttaaaaccagagaatgttttcagagctttgctaattcattgtattttatttttgaagtttaaaaacttaacttaatgtgagagttaatccagttcaacaaggtggctctggaagtaccaagggtgaataatagccaagacgcttaggaaaaatagcacttgctctagcagctgtcaaggcctaactacttaatacaaagctaaagttagttaaccctgttacaggaatagggatataaatacagattaatacagaataatacacaggcatttaaagactcttcagagacagcgttggagatccgagtgggaggagagcaactttttcataaaggtgtgaaacagccgttggaataaaacaatacagaaaaacatccatgacccaacaaaatatcaagattttaaataaaggcagtagtactgatttttcttttgcctcaagcgccagtaaggcttggtagggcacaacgctgacagtctacactggacgcccatgtgtccaacaatctctgttcacac

SEQ ID NO: 43 - DNA, 5775 bp, Homo sapiens
tcctaggcggcggccgcggcggcggaggcagcagcggcggcggcagtggcggcggcgaaggtggcggcggctcggccagtactcccggcccccgccatttcggactgggagcgagcgcggcgcaggcactgaaggcggcggcggggccagaggctcagcggctcccaggtgcgggagagaggcctgctgaaaatgactgaatataaacttgtggtagttggagcttgtggcgtaggcaagagtgccttgacgatacagctaattcagaatcattttgtggacgaatatgatccaacaatagaggattcctacaggaagcaagtagtaattgatggagaaacctgtctcttggatattctcgacacagcaggtcaagaggagtacagtgcaatgagggaccagtacatgaggactggggagggctttctttgtgtatttgccataaataatactaaatcatttgaagatattcaccattatagagaacaaattaaaagagttaaggactctgaagatgtacctatggtcctagtaggaaataaatgtgatttgccttctagaacagtagacacaaaacaggctcaggacttagcaagaagttatggaattccttttattgaaacatcagcaaagacaagacagggtgttgatgatgccttctatacattagttcgagaaattcgaaaacataaagaaaagatgagcaaagatggtaaaaagaagaaaaagaagtcaaagacaaagtgtgtaattatgtaaatacaatttgtacttttttcttaaggcatactagtacaagtggtaatttttgtacattacactaaattattagcatttgttttagcattacctaatttttttcctgctccatgcagactgttagcttttaccttaaatgcttattttaaaatgacagtggaagtttttttttcctcgaagtgccagtattcccagagttttggtttttgaactagcaatgcctgtgaaaaagaaactgaatacctaagatttctgtcttggggtttttggtgcatgcagttgattacttcttatttttcttaccaagtgtgaatgttggtgtgaaacaaattaatgaagcttttgaatcatccctattctgtgttttatctagtcacataaatggattaattactaatttcagttgagaccttctaattggtttttactgaaacattgagggacacaaatttatgggcttcctgatgatgattcttctaggcatcatgtcctatagtttgtcatccctgatgaatgtaaagttacactgttcacaaaggttttgtctcctttccactgctattagtcatggtcactctccccaaaatattatattttttctataaaaagaaaaaaatggaaaaaaattacaaggcaatggaaactattataaggccatttccttttcacattagataaattactataaagactcctaatagctttttcctgttaaggcagacccagtatgaatgggattattatagcaaccattttggggctatatttacatgctactaaatttttataataattgaaaagattttaacaagtataaaaaaattctcataggaattaaatgtagtctccctgtgtcagactgctctttcatagtataactttaaatcttttcttcaacttgagtctttgaagatagttttaattctgcttgtgacattaaaagattatttgggccagttatagcttattaggtgttgaagagaccaaggttgcaagccaggccctgtgtgaaccttgagctttcatagagagtttcacagcatggactgtgtgccccacggtcatccgagtggttgtacgatgcattggttagtcaaaaatggggagggactagggcagtttggatagctcaacaagatacaatctcactctgtggtggtcctgctgacaaatcaagagcattgcttttgtttcttaagaaaacaaactcttttttaaaaattacttttaaatattaactcaaaagttgagattttggggtggtggtgtgccaagacattaattttttttttaaacaatgaagtgaaaaagttttacaatctctaggtttggctagttctcttaacactggttaaattaacattgcataaacacttttcaagtctgatccatatttaataatgctttaaaataaaaataaaaacaatccttttgataaatttaaaatgttacttattttaaaataaatgaagtgagatggcatggtgaggtgaaagtatcactggactaggttgttggtgacttaggttctagataggtgtcttttaggactctgattttgaggacatcacttactatccatttcttcatgttaaaagaagtcatctcaaactcttagttttttttttttacactatgtgatttatattccatttacataaggatacacttatttgtcaagctcagcacaatctgtaaatttttaacctatgttacaccatcttcagtgccagtcttgggcaaaattgtgcaagaggtgaagtttatatttgaatatccattctcgttttaggactcttcttccatattagtgtcatcttgcctccctaccttccacatgccccatgacttgatgcagttttaatacttgtaattcccctaaccataagatttactgctgctgtggatatctccatgaagttttcccactgagtcacatcagaaatgccctacatcttattttcctcagggctcaagagaatctgacagataccataaagggatttgacctaatcactaattttcaggtggtggctgatgctttgaacatctctttgctgcccaatccattagcgacagtaggatttttcaaccctggtatgaatagacagaaccctatccagtggaaggagaatttaataaagatagtgcagaaagaattccttaggtaatctataactaggactactcctggtaacagtaatacattccattgttttagtaaccagaaatcttcatgcaatgaaaaatactttaattcatgaagcttacttttttttttttggtgtcagagtctcgctcttgtcacccaggctggaatgcagtggcgccatctcagctcactgcaaccttccatcttcccaggttcaagcgattctcgtgcctcggcctcctgagtagctgggattacaggcgtgtgcactacactcaactaatttttgtatttttaggagagacggggtttcacctgttggccaggctggtctcgaactcctgacctcaagtgattcacccaccttggcctcataaacctgttttgcagaactcatttattcagcaaatatttattgagtgcctaccagatgccagtcaccgcacaaggcactgggtatatggtatccccaaacaagagacataatcccggtccttaggtactgctagtgtggtctgtaatatcttactaaggcctttggtatacgacccagagataacacgatgcgtattttagttttgcaaagaaggggtttggtctctgtgccagctctataattgttttgctacgattccactgaaactcttcgatcaagctactttatgtaaatcacttcattgttttaaaggaataaacttgattatattgtttttttatttggcataactgtgattcttttaggacaattactgtacacattaaggtgtatgtcagatattcatattgacccaaatgtgtaatattccagttttctctgcataagtaattaaaatatacttaaaaattaatagttttatctgggtacaaataaacagtgcctgaactagttcacagacaagggaaacttctatgtaaaaatcactatgatttctgaattgctatgtgaaactacagatctttggaacactgtttaggtagggtgttaagacttgacacagtacctcgtttctacacagagaaagaaatggccatacttcaggaactgcagtgcttatgaggggatatttaggcctcttgaatttttgatgtagatgggcatttttttaaggtagtggttaattacctttatgtgaactttgaatggtttaacaaaagatttgtttttgtagagattttaaagggggagaattctagaaataaatgttacctaattattacagccttaaagacaaaaatccttgttgaagtttttttaaaaaaagactaaattacatagacttaggcattaacatgtttgtggaagaatatagcagacgtatattgtatcatttgagtgaatgttcccaagtaggcattctaggctctatttaactgagtcacactgcataggaatttagaacctaacttttataggttatcaaaactgttgtcaccattgcacaattttgtcctaatatatacatagaaactttgtggggcatgttaagttacagtttgcacaagttcatctcatttgtattccattgatttttttttttcttctaaacattttttcttcaaaacagtatatataactttttttaggggattttttttagacagcaaaaaactatctgaagatttccatttgtcaaaaagtaatgatttcttgataattgtgtagtgaatgttttttagaacccagcagttaccttgaaagctgaatttatatttagtaacttctgtgttaatactggatagcatgaattctgcattgagaaactgaatagctgtcataaaatgctttctttcctaaagaaagatactcacatgagttcttgaagaatagtcataactagattaagatctgtgttttagtttaatagtttgaagtgcctgtttgggataatgataggtaatttagatgaatttaggggaaaaaaaagttatctgcagttatgttgagggcccatctctccccccacacccccacagagctaactgggttacagtgttttatccgaaagtttccaattccactgtcttgtgttttcatgttgaaaatacttttgcatttttcctttgagtgccaatttcttactagtactatttcttaatgtaacatgtttacctggcctgtcttttaactatttttgtatagtgtaaactgaaacatgcacattttgtacattgtgctttcttttgtgggtcatatgcagtgtgatccagttgttttccatcatttggttgcgctgacctaggaatgttggtcatatcaaacattaaaaatgaccactcttttaatgaaattaacttttaaatgtttataggagtatgtgctgtgaagtgatctaaaatttgtaatatttttgtcatgaactgtactactcctaattattgtaatgtaataaaaatagttacagtgactatgagtgtgtatttattcatgcaaatttgaactgtttgccccgaaatggatatggatactttataagccatagacactatagtataccagtgaatcttttatgcagcttgttagaagtatccttttattttctaaaaggtgctgtggatattatgtaaaggcgtgtttgcttaaacaattttccatatttagaagtagatgcaaaacaaatctgcctttatgacaaaaaaataggataacattatttatttatttccttttatcaataaggtaattgatacacaacaggtgacttggttttaggcccaaaggtagcagcagcaacattaataatggaaataattgaatagttagttatgtatgttaatgccagtcaccagcaggctatttcaaggtcagaagtaatgactccatacatattatttatttctataactacatttaaatcattaccagg

SEQ ID NO: 44 - DNA, 1080 bp, Homo sapiens
atgactctggagtccatgatggcgtgttgcctgagcgatgaggtgaaggagtccaagcggatcaacgccgagatcgagaagcagctgcggcgggacaagcgcgacgcccggcgcgagctcaagctgctgctgctcggcacgggcgagagcgggaagagcacgttcatcaagcagatgcgcatcatccacggcgccggctactcggaggaggacaagcgcggcttcaccaagctcgtctaccagaacatcttcaccgccatgcaggccatgatccgggccatggagacgctcaagatcctctacaagtacgagcagaacaaggccaatgcgctcctgatccgggaggtggacgtggagaaggtgaccaccttcgagcatcagtacgtcagtgccatcaagaccctgtgggaggacccgggcatccaggaatgctacgaccgcaggcgcgagtaccagctctccgactctgccaagtactacctgaccgacgttgaccgcatcgccaccttgggctacctgcccacccagcaggacgtgctgcgggtccgcgtgcccaccaccggcatcatcgagtaccctttcgacctggagaacatcatcttccggatggtggatgtggggggccagcggtcggagcggaggaagtggatccactgctttgagaacgtgacatccatcatgtttctcgtcgccctcagcgaatacgaccaagtcctggtggagtcggacaacgagaaccggatggaggagagcaaagccctgttccggaccatcatcacctacccctggttccagaactcctccgtcatcctcttcctcaacaagaaggacctgctggaggacaagatcctgtactcgcacctggtggactacttccccgagttcgatggtccccagcgggacgcccaggcggcgcgggagttcatcctgaagatgttcgtggacctgaaccccgacagcgacaagatcatctactcacacttcacgtgtgccaccgacacggagaacatccgcttcgtgttcgcggccgtgaaggacaccatcctgcagctcaacctcaaggagtacaacctggtctga

SEQ ID NO: 45 - DNA, 570 bp, Homo sapiens
atgactgagtacaaactggtggtggttggagcaggtggtgttgggaaaagcgcactgacaatccagctaatccagaaccactttgtagatgaatatgatcccaccatagaggattcttacagaaaacaagtggttatagatggtgaaacctgtttgttggacatactggatacagctggacaagaagagtacagtgccatgagagaccaatacatgaggacaggcgaaggcttcctctgtgtatttgccatcaataatagcaagtcatttgcggatattaacctctacagggagcagattaagcgagtaaaagactcggatgatgtacctatggtgctagtgggaaacaagtgtgatttgccaacaaggacagttgatacaaaacaagcccacgaactggccaagagttacgggattccattcattgaaacctcagccaagaccagacagggtgttgaagatgctttttacacactggtaagagaaatacgccagtaccgaatgaaaaaactcaacagcagtgatgatgggactcagggttgtatgggattgccatgtgtggtgatgtaa

SEQ ID NO: 46 - DNA, 4131 bp, Homo sapiens
caaacaagtgcggccatttcaccagcccaggctggcttctgctgttgactggctgtggcacctcaagcagcccctttcccctctagcctcagtttatcaccgcaagagctaccattcatctagcacaacctgaccatcctcacactggtcagttccaaccttcccaggaatcttctgtggccatgttcactccggttttacagaacagagaacagaagctcagagaagtgaagcaacttgcccagctatgagagacagagccaggatttgaaaccagatgaggacgctgaggcccagagagggaaagccacttgcctagggacacacagcggggagaggtggagcagggcctctatttcgagacccctgactccacacctggtgtttgtgccaagaccccaggctgcctcccaggtcctctgggacagcccctgccttctaccaggaccatgggtagcaacaagagcaagcccaaggatgccagccagcggcgccgcagcctggagcccgccgagaacgtgcacggcgctggcgggggcgctttccccgcctcgcagacccccagcaagccagcctcggccgacggccaccgcggccccagcgcggccttcgcccccgcggccgccgagcccaagctgttcggaggcttcaactcctcggacaccgtcacctccccgcagagggcgggcccgctggccggtggagtgaccacctttgtggccctctatgactatgagtctaggacggagacagacctgtccttcaagaaaggcgagcggctccagattgtcaacaacacagagggagactggtggctggcccactcgctcagcacaggacagacaggctacatccccagcaactacgtggcgccctccgactccatccaggctgaggagtggtattttggcaagatcaccagacgggagtcagagcggttactgctcaatgcagagaacccgagagggaccttcctcgtgcgagaaagtgagaccacgaaaggtgcctactgcctctcagtgtctgacttcgacaacgccaagggcctcaacgtgaagcactacaagatccgcaagctggacagcggcggcttctacatcacctcccgcacccagttcaacagcctgcagcagctggtggcctactactccaaacacgccgatggcctgtgccaccgcctcaccaccgtgtgccccacgtccaagccgcagactcagggcctggccaaggatgcctgggagatccctcgggagtcgctgcggctggaggtcaagctgggccagggctgctttggcgaggtgtggatggggacctggaacggtaccaccagggtggccatcaaaaccctgaagcctggcacgatgtctccagaggccttcctgcaggaggcccaggtcatgaagaagctgaggcatgagaagctggtgcagttgtatgctgtggtttcagaggagcccatttacatcgtcacggagtacatgagcaaggggagtttgctggactttctcaagggggagacaggcaagtacctgcggctgcctcagctggtggacatggctgctcagatcgcctcaggcatggcgtacgtggagcggatgaactacgtccaccgggaccttcgtgcagccaacatcctggtgggagagaacctggtgtgcaaagtggccgactttgggctggctcggctcattgaagacaatgagtacacggcgcggcaaggtgccaaattccccatcaagtggacggctccagaagctgccctctatggccgcttcaccatcaagtcggacgtgtggtccttcgggatcctgctgactgagctcaccacaaagggacgggtgccctaccctgggatggtgaaccgcgaggtgctggaccaggtggagcggggctaccggatgccctgcccgccggagtgtcccgagtccctgcacgacctcatgtgccagtgctggcggaaggagcctgaggagcggcccaccttcgagtacctgcaggccttcctggaggactacttcacgtccaccgagccccagtaccagcccggggagaacctctaggcacaggcgggcccagaccggcttctcggcttggatcctgggctgggtggcccctgtctcggggcttgccccactctgcctgcctgctgttggtcctctctctgtggggctgaattgccaggggcgaggcccttcctctttggtggcatggaaggggcttctggacctagggtggcctgagagggcggtgggtatgcgagaccagcacggtgactctgtccagctcccgctgtggccgcacgcctctccctgcactccctcctggagctctgtgggtctctggaagaggaaccaggagaagggctggggccggggctgagggtgcccttttccagcctcagcctactccgctcactgaactccttccccacttctgtgccacccccggtctatgtcgagagctggccaaagagcctttccaaagaggagcgatgggcccctggccccgcctgcctgccaccctgccccttgccatccattctggaaacacctgtaggcagaggctgccgagacagaccctctgccgctgcttccaggctgggcagcacaaggccttgcctggcctgatgatggtgggtgggtgggatgagtaccccctcaaaccctgccctccttagacctgagggacccttcgagatcatcacttccttgcccccatttcacccatggggagacagttgagagcggggatgtgacatgcccaaggccacggagcagttcagagtggaggcgggcttggaacccggtgctccctctgtcatcctcaggaaccaacaattcgtcggaggcatcatggaaagactgggacagcccaggaaacaaggggtctgaggatgcattcgagatggcagattcccactgccgctgcccgctcagcccagctgttgggaacagcatggaggcagatgtggggctgagctggggaatcagggtaaaaggtgcaggtgtggagagagaggcttcaatcggcttgtgggtgatgtttgaccttcagagccagccggctatgaaagggagcgagcccctcggctctggaggcaatcaagcagacatagaagagccaagagtccaggaggccctggtcctggcctccttccccgtactttgtcccgtggcatttcaattcctggccctgttctcctccccaagtcggcaccctttaactcatgaggagggaaaagagtgcctaagcgggggtgaaagaggacgtgttacccactgccatgcaccaggactggctgtgtaaccttgggtggcccctgctgtctctctgggctgcagagtctgccccacatgtggccatggcctctgcaactgctcagctctggtccaggccctgtggcaggacacacatggtgagcctagccctgggacatcaggagactgggctctggctctgttcggcctttgggtgtgtggtggattctccctgggcctcagtgtgcccatctgtaaaggggcagctgacagtttgtggcatcttgccaagggtccctgtgtgtgtgtatgtgtgtgcatgtgtgcgtgtctccatgtgcgtccatatttaacatgtaaaaatgtcccccccgctccgtcccccaaacatgttgtacatttcaccatggccccctcatcatagcaataacattcccactgccaggggttcttgagccagccaggccctgccagtggggaaggaggccaagcagtgcctgcctatgaaatttcaacttttcctttcatacgtctttattacccaagtcttctcccgtccattccagtcaaatctgggctcactcaccccagcgagctctcaaatccctctccaactgcctaaggccctttgtgtaaggtgtcttaatactgtcctttttttttttttaacagtgttttgtagatttcagatgactatgcagaggcctgggggacccctggctctgggccgggcctggggctccgaaattccaaggcccagacttgcggggggtgggggggtatccagaattggttgtaaatactttgcatattgtctgattaaacacaaacagacctcagaatctgatcaacagttaaaaaaaaaaaaaaaaaa

SEQ ID NO: 47 - DNA, 1449 bp, Homo sapiens
agaaaggagtggggttgaaaagcgcttgcgcaggacggctacggtacgggggtgggagggcttcggagcacgcgcgcggaggcgggacttgggaagcgctcgcgagatcttcagggtctatatataagcgcggggagcctgcgtcctttccctggtgtgattccgtcctgcgcggttgttctctggagcagcgttcttttatctccgtccgccttctctcctacctaagtgcgtgccgccacccgatggaagattcgatggacatggacatgagccccctgaggccccagaactatcttttcggttgtgaactaaaggccgacaaagattatcactttaaggtggataatgatgaaaatgagcaccagttatctttaagaacggtcagtttaggggctggtgcaaaggatgagttgcacattgttgaagcagaggcaatgaattacgaaggcagtccaattaaagtaacactggcaactttgaaaatgtctgtacagccaacggtttcccttgggggctttgaaataacaccaccagtggtcttaaggttgaagtgtggttcagggccagtgcatattagtggacagcacttagtagctgtggaggaagatgcagagtcagaagatgaagaggaggaggatgtgaaactcttaagtatatctggaaagcggtctgcccctggaggtggtagcaaggttccacagaaaaaagtaaaacttgctgctgatgaagatgatgacgatgatgatgaagaggatgatgatgaagatgatgatgatgatgattttgatgatgaggaagctgaagaaaaagcgccagtgaagaaatctatacgagatactccagccaaaaatgcacaaaagtcaaatcagaatggaaaagactcaaaaccatcatcaacaccaagatcaaaaggacaagaatccttcaagaaacaggaaaaaactcctaaaacaccaaaaggacctagttctgtagaagacattaaagcaaaaatgcaagcaagtatagaaaaaggtggttctcttcccaaagtggaagccaaattcatcaattatgtgaagaattgcttccggatgactgaccaagaggctattcaagatctctggcagtggaggaagtctctttaagaaaatagtttaaacaatttgttaaaaaattttccgtcttatttcatttctgtaacagttgatatctggctgtcctttttataatgcagagtgagaactttccctaccgtgtttgataaatgttgtccaggttctattgccaagaatgtgttgtccaaaatgcctgtttagtttttaaagatggaactccaccctttgcttggttttaagtatgtatggaatgttatgataggacatagtagtagcggtggtcagacatggaaatggtggggagacaaaaatatacatgtgaaataaaactcagtattttaataaagta

SEQ ID NO: 48 - DNA, 3772 bp, Homo sapiens
gggctgaagacaacttggattgcgaggctagggcttggggagtcgtgcatcccgttccgggcctccgcagcccaacatgggccccgggttccaaagtttgcgaagttgggcgccgaggggccggggcgcgcggagcgtccgggggggcccgggcccggattctctgggcgcacaggtcgcctgagccgcctccgcggccgccgaggtcgtgcgtgtggccggggggctccgaggagcaggcgggggcgccggggcttttgctgagttggcggggttggccatggccgctgcccgcccagcgcgggggccggagctcccgctcctggggctgctgctgctgctgctgctgggggacccgggccggggggcggcctcgagcgggaacgcgaccgggcctgggcctcggagcgcgggcgggagcgcgaggaggagcgcggcggtgactggccctccgccgccgctgagccactgcggccgggctgccccctgcgagccgctgcgctacaacgtgtgcctgggctcggtgctgccctacggggccacctccacactgctggccggagactcggactcccaggaggaagcgcacggcaagctcgtgctctggtcgggcctccggaatgccccccgctgctgggcagtgatccagcccctgctgtgtgccgtatacatgcccaagtgtgagaatgaccgggtggagctgcccagccgtaccctctgccaggccacccgaggcccctgtgccatcgtggagagggagcggggctggcctgacttcctgcgctgcactcctgaccgcttccctgaaggctgcacgaatgaggtgcagaacatcaagttcaacagttcaggccagtgcgaagtgcccttggttcggacagacaaccccaagagctggtacgaggacgtggagggctgcggcatccagtgccagaacccgctcttcacagaggctgagcaccaggacatgcacagctacatcgcggccttcggggccgtcacgggcctctgcacgctcttcaccctggccacattcgtggctgactggcggaactcgaatcgctaccctgctgttattctcttctacgtcaatgcgtgcttctttgtgggcagcattggctggctggcccagttcatggatggtgcccgccgagagatcgtctgccgtgcagatggcaccatgaggcttggggagcccacctccaatgagactctgtcctgcgtcatcatctttgtcatcgtgtactacgccctgatggctggtgtggtttggtttgtggtcctcacctatgcctggcacacttccttcaaagccctgggcaccacctaccagcctctctcgggcaagacctcctacttccacctgctcacctggtcactcccctttgtcctcactgtggcaatccttgctgtggcgcaggtggatggggactctgtgagtgggatttgttttgtgggctacaagaactaccgataccgtgcgggcttcgtgctggccccaatcggcctggtgctcatcgtgggaggctacttcctcatccgaggagtcatgactctgttctccatcaagagcaaccaccccgggctgctgagtgagaaggctgccagcaagatcaacgagaccatgctgcgcctgggcatttttggcttcctggcctttggctttgtgctcattaccttcagctgccacttctacgacttcttcaaccaggctgagtgggagcgcagcttccgggactatgtgctatgtcaggccaatgtgaccatcgggctgcccaccaagcagcccatccctgactgtgagatcaagaatcgcccgagccttctggtggagaagatcaacctgtttgccatgtttggaactggcatcgccatgagcacctgggtctggaccaaggccacgctgctcatctggaggcgtacctggtgcaggttgactgggcagagtgacgatgagccaaagcggatcaagaagagcaagatgattgccaaggccttctctaagcggcacgagctcctgcagaacccaggccaggagctgtccttcagcatgcacactgtgtcccacgacgggcccgtggcgggcttggcctttgacctcaatgagccctcagctgatgtctcctctgcctgggcccagcatgtcaccaagatggtggctcggagaggagccatactgccccaggatatttctgtcacccctgtggcaactccagtgcccccagaggaacaagccaacctgtggctggttgaggcagagatctccccagagctgcagaagcgcctgggccggaagaagaagaggaggaagaggaagaaggaggtgtgcccgctggcgccgccccctgagcttcacccccctgcccctgcccccagtaccattcctcgactgcctcagctgccccggcagaaatgcctggtggctgcaggtgcctggggagctggggactcttgccgacagggagcgtggaccctggtctccaacccattctgcccagagcccagtccccctcaggatccatttctgcccagtgcaccggcccccgtggcatgggctcatggccgccgacagggcctggggcctattcactcccgcaccaacctgatggacacagaactcatggatgcagactcggacttctgagcctgcagagcaggacctgggacaggaaagagaggaaccaataccttcaaggctcttcttcctcaccgagcatgcttccctaggatcccgtcttccagagaacctgtgggctgactgccctccgaagagagttctggatgtctggctcaaagcagcaggactgtgggaaagagcctaacatctccatggggaggcctcaccccagggacagggccctggagctcagggtccttgtttctgccctgccagctgcagcctggttggcagcatctgctccatcggggcagggggtatgcagagcttgtggtggggcaggaacggtggaggcagaggtgacagttcccagagtgggctttggtggccagggaggcagcctagcctatgtctggcagatgagggctggctgccgttttctgggctgatgggtgccctttcctggcagtctcagtccaaaagtgttgactgtgtcattagtcctttgtctaagtagggccagggcaccgtattcctctcccaggtgtttgtggggctggaaggacctgctcccacaggggccatgtcctctcttaataggtggcactaccccaaacccatcttttgttctcctatatcctccttctcctgttccatttcagttcagtttcagcggtgccaacctctttgcgtttcctttttgttgatgaggacccagagctgctgcacacactcacctctaaccccctcccctcgctgctgggccccatctccacaggagagactggttcagctctagggcctcagtctggagtgggataggagcagtgagtgacaaagcctctgaaagatgcatcatctcttcctcacacccatttagtgggggatgggtcctctagacttgaggggctaccctgggaagctgccgtagcttcagccaggcaagaaagcttccttcaacctgcatagccggtgggtgaggagattcccaccttccatagcctccaaacatgttcccaaggccccactttcaagaatcagacagcaggaagccatagatgctggctgggttccaggttatggggagaagaaatacagtcaataaaaggtttttgtataaaaaaaaaaaaaaaaaaaaaaaaaaaaaaaaaaaaa

SEQ ID NO: 49 - DNA, 2201 bp, Homo sapiens
agtgctgtttaacttttctttgtaagtgagggtggtggagggtgcccataatcttttcagggagtaagttcttcttggtctttctttctttctttctttctttttttcttgagaccaagtttcgctcttgtctcccaggctggagtgcaatggcgcgatctcggctcactgcaacctccgccttctcctgggttcaagcgattctcctacatcagcctccgagtagctgggattacaggcatgcgccaccaagccccgctaattttgtattttttagtagagacagggtttcgccatgttggtcaggcttgtctcgaactcctggcctcaggtgatccgcctgtctcggcctcccagaatgctgggattatagacgtgagccaccgcatccggactttccttttatgtaatagtgataattctatccaaagcatttttttttttttttgagtcggagtctcattctgtcacccaggctggagggtggtggcgcgatctcggcttactgcaacctctgcctcccgggttcaagcgattctcctgcctcagcctcctgagtagctggaattacacacgtgcgccaccatggccagctaatttttgtatttttagtagagacggggtgtcaccattttggccaagctggcctcgaactcctgacctcaggtgatctgcccgcctcggcttcccaaagtgctgggattacaggtgtgagccaccgcgtcctgctccaaagcattttctttctatgcctcaaaacaagattgcaagccagtcctcaaagcggataattcaagagctaacaggtattagcttaggatgtgtggcactgttcttaaggcttatatgtattaatacatcatttaaactcacaacaacccctataaagcagggggcactcatattcccttccccctttataattacgaaaaatgcaaggtattttcagtaggaaagagaaatgtgagaagtgtgaaggagacaggacagtatttgaagctggtctttggatcactgtgcaactctgcttctagaacactgagcactttttctggtctaggaattatgactttgagaatggagtccgtccttccaatgactccctccccattttcctatctgcctacaggcagaattctcccccgtccgtattaaataaacctcatcttttcagagtctgctcttataccaggcaatgtacacgtctgagaaacccttgccccagacagccgttttacacgcaggaggggaaggggaggggaaggagagagcagtccgactctccaaaaggaatcctttgaactagggtttctgacttagtgaaccccgcgctcctgaaaatcaagggttgagggggtagggggacactttctagtcgtacaggtgatttcgattctcggtggggctctcacaactaggaaagaatagttttgctttttcttatgattaaaagaagaagccatactttccctatgacaccaaacaccccgattcaatttggcagttaggaaggttgtatcgcggaggaaggaaacggggcgggggcggatttctttttaacagagtgaacgcactcaaacacgcctttgctggcaggcgggggagcgcggctgggagcagggaggccggagggcggtgtggggggcaggtggggaggagcccagtcctccttccttgccaacgctggctctggcgagggctgcttccggctggtgcccccgggggagacccaacctggggcgacttcaggggtgccacattcgctaagtgctcggagttaatagcacctcctccgagcactcgctcacagcgtccccttgcctggaaagataccgcggtccctccagaggatttgagggacagggtcggagggggctcttccgccagcaccggaggaagaaagaggaggggctggctggtcaccagagggtggggcggaccgcgtgcgctcggcggctgcggagagggggagagcaggcagcgggcggcggggagcagcatggagccggcggcggggagcagcatggagccttcggctgactggctggccacggccgcggcccggggtcgggtagaggaggtgcgggcgctgctggaggcgggggcgctgcccaacgcaccgaatagttacggtcggaggccgatccaggtgggtagagggtctgcagcgggagcaggggatggcgggcgactctggagga

SEQ ID NO: 50 - DNA, 1838 bp, Homo sapiens
ggatccctgatggggagaatgtgaaaattccagtggccatcaaagtgttgagggaaaacacatcccccaaagccaacaaagaaatcttagacgtaagcccctccaccctctcctgctaggaggacaggaaggaccccatggctgcaggtctgggctctggtctctcttcattggggtttggggagatatgactcccgcaaacctagactatttttttggagacggagcttgctctgtcacccaggctggagtgcagtggcgttatctcggctcactgcaacctccacctcctggactcaagcgattttcatgcctcaggctcctgagtagctgggattacaagcgcccgctaattttttttttttttttgagacagagtctcgctctgtcacccaggctagagtgaaatggtgcggtctcagctcagcctcccaggttaaagcgattcttctccctcagtctcctgagtagctgggattacaggcgcgagccaccacgcccggctaatttttgtatttttagtagagatgggatttcaccatgttggccaggttggtgtcaaactcctgacctcatgatccgcccgcctcggcctcccaaagtgctgggattacaggtgtgagccacgtgcccggcctaatctttgtatttttagtagagacagggtttcaccatgttgtccaggctggtactttgagccttcacaggctgtgggccatggctgtggtttgtgatggttgggaggctgtgtggtgtttgggggtgtgtggtctcccataccctctcagcgtacccttgtccccaggaagcatacgtgatggctggtgtgggctccccatatgtctcccgccttctgggcatctgcctgacatccacggtgcagctggtgacacagcttatgccctatggctgcctcttagaccatgtccgggaaaaccgcggacgcctgggctcccaggacctgctgaactggtgtatgcagattgccaaggtatgcacctgggctctttgcaggtctctccggagcaaacccctatgtccacaaggggctaggatggggactcttgctgggcatgtggccaggcccaggccctcccagaaggtctacatgggtgcttcccattccaggggatgagctacctggaggatgtgcggctcgtacacagggacttggccgctcggaacgtgctggtcaagagtcccaaccatgtcaaaattacagacttcgggctggctcggctgctggacattgacgagacagagtaccatgcagatgggggcaaggttaggtgaaggaccaaggagcagaggaggctgggtggagtggtgtctagcccatgggagaactctgagtggccactcccacaacacacagttggaggacttcctcttctgccctccccagtgcccatcaagtggatggcgctggagtccattctccgccggcggttcacccaccagagtgatgtgtggagttatggtgtgtgatggggggtgttgggaggggtgggtgaggagccatggctggagggaggatgagagctgggatggggagaattacggggccacctcagcatgtgaagggagggaaggggctgcctgtgccccaccttgcagggtctgtgcacttcccaggattagggaaagaccgggtagggtctgtctcctggcatcacatctccccctgctacctgccatgatgctagactcctgagcagaacctctggctcagtacactaaagctccctctggccctcccactcctgaccctgtctctgccttaggtgtgactgtgtgggagctgatgacttttggggccaaaccttacgatgggatcc

SEQ ID NO: 51 - DNA, 2891 bp, Homo sapiens
  misc_feature (223)..(223): where "n" is a or c or g or t
  misc_feature (366)..(366): where "n" is a or c or g or t
cccctttcccccgaattgttttctcttttggaggtggtggagggagagaaaagtttacttaaaatgcctttgggtgagggaccaaggatgagaagaatgttttttgtttttcatgccgtggaataacacaaaataaaaaatcccgagggaatatacattatatattaaatatagatcatttcagggagcaaacaaatcatgtgtggggctgggcaactagctnaagtcgaagcgtaaataaaatgtgaatacacgtttgcgggttacatacagtgcactttcactagtattcagaaaaaattgtgagtcagtgaactaggaaattaatgcctggaaggcagccaaattttaattagctcaagactnccccccccccccaaaaaaaggcacggaagtaatactcctctcctcttctttgatcagaatcgatgcattttttgtgcatgaccgcatttccaataataaaaggggaaagaggacctggaaaggaattaaacgtccggtttgtccggggaggaaagagttaacggtttttttcacaagggtctctgctgactcccccggctcggtccacaagctctccacttgccccttttaggaagtccggtcccgcggttcgggtaccccctgcccctcccatattctcccgtctagcacctttgatttctcccaaacccggcagcccgagactgttgcaaaccggcgccacagggcgcaaaggggatttgtctcttctgaaacctggctgagaaattgggaactccgtgtgggaggcgtgggggtgggacggtggggtacagactggcagagagcaggcaacctccctctcgccctagcccagctctggaacaggcagacacatctcagggctaaacagacgcctcccgcacggggccccacggaagcctgagcaggcggggcaggagggccggtatctgctgctttggcagcaaattgggggactcagtctgggtggaaggtatccaatccagatagctgtgcatacataatgcataatacatgactccccccaacaaatgcaatgggagtttattcataacgcgctctccaagtatacgtggcaatgcgttgctgggttattttaatcattctaggcatcgttttcctccttatgcctctatcattcctccctatctacactaacatcccacgctctgaacgcgcgcccattaatacccttctttcctccactctccctgggactcttgatcaaagcgcggccctttccccagccttagcgaggcgccctgcagcctggtacgcgcgtggcgtggcggtgggcgcgcagtgcgttctcggtgtggagggcagctgttccgcctgcgatgatttatactcacaggacaaggatgcggtttgtcaaacagtactgctacggaggagcagcagagaaagggagagggtttgagagggagcaaaagaaaatggtaggcgcgcgtagttaattcatgcggctctcttactctgtttacatcctagagctagagtgctcggctgcccggctgagtctcctccccaccttccccaccctccccaccctccccataagcgcccctcccgggttcccaaagcagagggcgtgggggaaaagaaaaaagatcctctctcgctaatctccgcccaccggccctttataatgcgagggtctggacggctgaggacccccgagctgtgctgctcgcggccgccaccgccgggccccggccgtccctggctcccctcctgcctcgagaagggcagggcttctcagaggcttggcgggaaaaagaacggagggagggatcgcgctgagtataaaagccggttttcggggctttatctaactcgctgtagtaattccagcgagaggcagagggagcgagcgggcggccggctagggtggaagagccgggcgagcagagctgcgctgtgggcgtcctgggaagggagatccggagcgaatagggggcttcgcctctggcccagccctcccgctgatcccccaaccagcggtccgcaacccttgtcgcatccacgaaactttgtccatagcagcgggcggacactttgcactggaacttacaacacccgagcaaagacgcgactctcccgacgcggggaggctattctgcccatttggggacacttccccgccgctgccaggacccgcttctctgaaaggctctccttgcagctgcttagacgctggatttttttcgggtggaaaaccaggtaagcaccgaagtccacttgccttttaatttatttttttatcactttaatgctgagatgagtcgaatgcctaaatagggtgtcttttctcccattcctgcgctattgacacttttctcagagtagttatggtaattggggctggggtggggggtaatccagaactggatcggggtaaagtgacttgtcaagatggcagaggagaaggcagagggaaaacgggaatggtttttaagactaccctttcgagatttctgccttatgaatatattcacgctgactcccggccggtcggacattcctgctttattgtgttaattgctctctgcgttttggggggctgggggttgctttgcggtgggcagaaagccccttgcatcctgagctccttggagtagggaccgcatatcgcctgtgtgagccagatcgctccgcagccgctgacttgtccccgtctccgggagggcatttaaatttcggctcaccgcatttctgacagccggagacggacactgcggcgcgtcccgcccgcctgtccccgcggcgattgcaacccgccctgatccttttaagaagttggcatttggctttttaaaaaacaataatacaatttaaaacctgggtctctagaggtgttaggacgtggtgttgggtaggcg

SEQ ID NO: 52 - DNA, 5653 bp, Homo sapiens
gacaaagagaactaatgctttgtgctgattcatatttgaatcgaggcattgggaaccctgtatgccttgtttgtggaaagaaccagtgacaccatcactgagcttcctaaaagttcgaagaagttagaggactatacactttcttttgaacttttataataaatatttgctctggtttttggaacccagggctgttagaggggtgagtgacaagtcttacaagtggccttattccaactccagaaattgcccaacggaactttgagattatatgcaatcgaaagtgacaggaaacatgccaactcaatccctcttaatgtacatggatgggccagaagtgattggcagctctcttggcagtccgatggagatggaggatgccttgtcaatgaaagggaccgctgttgttccattccgagctacacaagaaaaaaatgtcatccaaatcgaggggtatatgcccttggattgcatgttctgcagccagaccttcacacattcagaagaccttaataaacatgtcttaatgcaacaccggcctaccctctgtgaaccagcagttcttcgggttgaagcagagtatctcagtccgcttgataaaagtcaagtgcgaacagaacctcccaaggaaaagaattgcaaggaaaatgaatttagctgtgaggtatgtgggcagacatttagagtcgcttttgatgttgagatccacatgagaacacacaaagattctttcacttacgggtgtaacatgtgcggaagaagattcaaggagccttggtttcttaaaaatcacatgcggacacataatggcaaatcgggggccagaagcaaactgcagcaaggcttggagagtagtccagcaacgatcaacgaggtcgtccaggtgcacgcggccgagagcatctcctctccttacaaaatctgcatggtttgtggcttcctatttccaaataaagaaagtctaattgagcaccgcaaggtgcacaccaaaaaaactgctttcggtaccagcagcgcgcagacagactctccacaaggaggaatgccgtcctcgagggaggacttcctgcagttgttcaacttgagaccaaaatctcaccctgaaacggggaagaagcctgtcagatgcatccctcagctcgatccgttcaccaccttccaggcttggcagctggctaccaaaggaaaagttgccatttgccaagaagtgaaggaatcggggcaagaagggagcaccgacaacgacgattcgagttccgagaaggagcttggagaaacaaataagggcagttgtgcaggcctctcgcaagagaaagagaagtgcaaacactcccacggcgaagcgccctccgtggacgcggatcccaagttacccagtagcaaggagaagcccactcactgctccgagtgcggcaaagctttcagaacctaccaccagctggtcttgcactccagggtccacaagaaggaccggagggccggcgcggagtcgcccaccatgtctgtggacgggaggcagccggggacgtgttctcctgacctcgccgcccctctggatgaaaatggagccgtggatcgaggggaaggtggttctgaagacggatctgaggatgggcttcccgaaggaatccatctggataaaaatgatgatggaggaaaaataaaacatcttacatcttcaagagagtgtagttattgtggaaagtttttccgttcaaattattacctcaatattcatctcagaacgcatacaggtgaaaaaccatacaaatgtgaattttgtgaatatgctgcagcccagaagacatctctgaggtatcacttggagagacatcacaaggaaaaacaaaccgatgttgctgctgaagtcaagaacgatggtaaaaatcaggacactgaagatgcactattaaccgctgacagtgcgcaaaccaaaaatttgaaaagattttttgatggtgccaaagatgttacaggcagtccacctgcaaagcagcttaaggagatgccttctgtttttcagaatgttctgggcagcgctgtcctctcaccagcacacaaagatactcaggatttccataaaaatgcagctgatgacagtgctgataaagtgaataaaaaccctacccctgcttacctggacctgttaaaaaagagatcagcagttgaaactcaggcaaataacctcatctgtagaaccaaggcggatgttactcctcctccggatggcagtaccacccataaccttgaagttagccccaaagagaagcaaacggagaccgcagctgactgcagatacaggccaagtgtggattgtcacgaaaaacctttaaatttatccgtgggggctcttcacaattgcccggcaatttctttgagtaaaagtttgattccaagtatcacctgtccattttgtaccttcaagacattttatccagaagttttaatgatgcaccagagactggagcataaatacaatcctgacgttcataaaaactgtcgaaacaagtccttgcttagaagtcgacgtaccggatgcccgccagcgttgctgggaaaagatgtgcctcccctctctagtttctgtaaacccaagcccaagtctgctttcccggcgcagtccaaatccctgccatctgcgaaggggaagcagagccctcctgggccaggcaaggcccctctgacttcagggatagactctagcactttagccccaagtaacctgaagtcccacagaccacagcagaatgtgggggtccaaggggccgccaccaggcaacagcaatctgagatgtttcctaaaaccagtgtttcccctgcaccggataagacaaaaagacccgagacaaaattgaaacctcttccagtagctccttctcagcccaccctcggcagcagtaacatcaatggttccatcgactaccccgccaagaacgacagcccgtgggcacctccgggaagagactatttctgtaatcggagtgccagcaatactgcagcagaatttggtgagccccttccaaaaagactgaagtccagcgtggttgcccttgacgttgaccagcccggggccaattacagaagaggctatgaccttcccaagtaccatatggtcagaggcatcacatcactgttaccgcaggactgtgtgtatccgtcgcaggcgctgcctcccaaaccaaggttcctgagctccagcgaggtcgattctccaaatgtgctgactgttcagaagccctatggtggctccgggccactttacacttgtgtgcctgctggtagtccagcatccagctcgacgttagaaggaaaaaggcctgtgtcatatcaacacttatctaacagcatggcacaaaagagaaactatgagaattttattgggaatgcacattatcgaccaaatgacaaaaaaacttgattcactaattagggggaaaaaaggtcttggtggatgtcagtgcttactccccatgaaattaaattttacttcatcctttgagaagcgaatggtgaaagctactgaaataagctgtgattgtactgtacataaaacatatgaggaatctgcaaggaacactacagttgtgtaaagttgttctgttaacttttgtaccaaatagcaatacaaactagttggaacagttggaacttacatacatggggactggaaatctctattttgtccctgaataatatttttcttagaattgaccaaataagaagtggaatttttgcatacttgagcgctgctgaaaagaaatcatttgggttgggtggggcgggatgggggaaaagtatataatgcttgcacctcaggtaaaaatctgtaaatatctaagttgtaaacctgcttgttcaaatactgtgtgtattccttttctctaatgcagctcatcacttggagcagtttctgctattgtgctctttcatttaaaatgtatgtttttttttttttaaactgtcaatgattttgtattatgttgaatccacccaaatctattgttgtcttaaaattgttaatggaagtattgaccctctatgatatgtgctgcagatatcgaggtcagccattcggaagctggcagcattttatcgcaactttgagcatctcagatggggaaggcaccttcttcctcgcctctccagattgtcctggaacctccaggatccttgactgagggcgttgggatggcttgtaggatttttaagagagtgtgtctacagacaagcattttctctgtagagcagccacacgttgtataaacataaactgtatgtgcagttatttaaatttgtttctgtcaaattaatcatttttgttggacgattcagtggcgggggggttttgcctaaattagtatataaaaacaaaaatgctaaattatatctgtgaattgcaggtattggggaacagttttaagggaaattttggggggaacattttaggtttgtatttggtagtcttaatgtatctggcatttgggtgaactgtggacatactagagttgattatagacacattgattttgaataaggaactgctggccgagcccgctgggagtctagaaagagaaaatctgtttctagacctcagttattttcccatttttggttgttttgaagcagtaacatttttctcagtgcacatgcaatttgggttttagagaagatggccaccagctggcttcctagatattttaaacttttgttctttaatatgctgtccatggctgagtttattagtacatgggcttagtgaccacaaaatattttattaagaaactgtttcaaaaataaatttgcactgttcatttttctggcctcgctgttctccatagagcaagggtaatcctagaaaaaattttttttttttaaattatgcaacgtaagatgtcctccttgatagaagtcttagctcctgtgttacaagggagaactcatttgagatcagtctgttggcattgcaatgaagtgctttgtatcaggaaagtgtacactattgaccttttttcctgttcacaagctgagccatatgtacataatctagattttgttttcatagttttgcacttttatagcctatttttgaagattaacacatttgcaagatgattgactcaatctttgcctaatccaatgagtgttacagagagcttgctgtgactagaaccataaatcttaaagggggtatgtgataatagagggctggaatttaaacctgtatttaaaaaaaagaatcaccaaatctatttgaaaacaagtcgatttgtattatgctggaattttttgggctttcagatttctctttttaaccacatttctgaatgtataaaaataccaattattttcctacagccctttgtacttcaaaatatgtttttgtgtccatcagtattaactattggtatactactggttttatatttttttttctttgagacaacagtacatataatagaggtacaattcgttggatttttgtttatgtatttatttcattccagtttgatttattttaattgttgatacttaagttgtcgaacagtagacattacttgttttatttatgatatatttcagcttaaagttatgttattatatgtggaagtgtaaatatagatttggtgttttgcaaaaaaaaaaaaaaaaaaaa

1. A method for identifying esophageal adenocarcinoma (EAC) in a subject comprising:
pan-brushing the esophageal mucosa of the subject to obtain a sample;
isolating DNA from the sample;
performing next generation sequencing (NGS) on the isolated DNA; and
analyzing the sequencing results and identifying any genomic abnormalities in one or more driver genes, wherein an abnormality indicates the subject has esophageal adenocarcinoma.

2. The method of claim 1, wherein the one or more driver genes are oncogenes or tumor suppressor genes.

3. The method of claim 1, wherein the one or more driver genes are selected from the group comprising:

| | | | |
|---|---|---|---|
| ABL1 | EGFR | GNAS | MLH1 |
| SEQ ID | SEQ ID | SEQ ID | SEQ ID |
| NO. 1 | NO. 2 | NO. 3 | NO. 4 |
| RET | AKT1 | ERBB2 | CSF1R |
| SEQ ID | SEQ ID | SEQ ID | SEQ ID |
| NO. 5 | NO. 6 | NO. 7 | NO. 8 |
| HNF1A | MPL | SMAD4 | ALK |
| SEQ ID | SEQ ID | SEQ ID | SEQ ID |
| NO. 9 | NO. 10 | NO. 11 | NO. 12 |
| ERBB4 | HRAS | NOTCH1 | GNAQ |
| SEQ ID | SEQ ID | SEQ ID | SEQ ID |
| NO. 13 | NO. 14 | NO. 15 | NO. 16 |
| SMARCB1 | APC | FBXW7 | IDH1 |
| SEQ ID | SEQ ID | SEQ ID | SEQ ID |
| NO. 17 | NO. 18 | NO. 19 | NO. 20 |
| ATM | FGFR1 | MET | JAK2 |
| SEQ ID | SEQ ID | SEQ ID | SEQ ID |
| NO. 21 | NO. 22 | NO. 23 | NO. 24 |
| BRAF | FGFR2 | JAK3 | PDGFRA |
| SEQ ID | SEQ ID | SEQ ID | SEQ ID |
| NO. 25 | NO. 26 | NO. 27 | NO. 28 |
| STK11 | RB1 | CDH1 | FGFR3 |
| SEQ ID | SEQ ID | SEQ ID | SEQ ID |
| NO. 29 | NO. 30 | NO. 31 | NO. 32 |
| KDR | PIK3CA | TP53 | CDKN2A |
| SEQ ID | SEQ ID | SEQ ID | SEQ ID |
| NO. 33 | NO. 34 | NO. 35 | NO. 36 |
| FLT3 | KIT | PTEN | VHL |
| SEQ ID | SEQ ID | SEQ ID | SEQ ID |
| NO. 37 | NO. 38 | NO. 39 | NO. 40 |
| PTPN11 | CTNNB1 | KRAS | GNA11 |
| SEQ ID | SEQ ID | SEQ ID | SEQ ID |
| NO. 41 | NO. 42 | NO. 43 | NO. 44 |
| NRAS | SRC | NPM1 | SMO |
| SEQ ID | SEQ ID | SEQ ID | SEQ ID |
| NO. 45 | NO. 46 | NO. 47 | NO. 48 |

4. The method of claim 1, wherein

| | | | |
|---|---|---|---|
| ABL1 | EGFR | GNAS | MLH1 |
| SEQ ID | SEQ ID | SEQ ID | SEQ ID |
| NO. 1 | NO. 2 | NO. 3 | NO. 4 |
| RET | AKT1 | ERBB2 | CSF1R |
| SEQ ID | SEQ ID | SEQ ID | SEQ ID |
| NO. 5 | NO. 6 | NO. 7 | NO. 8 |
| HNF1A | MPL | SMAD4 | ALK |
| SEQ ID | SEQ ID | SEQ ID | SEQ ID |
| NO. 9 | NO. 10 | NO. 11 | NO. 12 |
| ERBB 4 | HRAS | NOTCH1 | GNAQ |
| SEQ ID | SEQ ID | SEQ ID | SEQ ID |
| NO. 13 | NO. 14 | NO. 15 | NO. 16 |
| SMARCB1 | APC | FBXW7 | IDH1 |
| SEQ ID | SEQ ID | SEQ ID | SEQ ID |
| NO. 17 | NO. 18 | NO. 19 | NO. 20 |
| ATM | FGFR1 | MET | JAK2 |
| SEQ ID | SEQ ID | SEQ ID | SEQ ID |
| NO. 21 | NO. 22 | NO. 23 | NO. 24 |
| BRAF | FGFR2 | JAK3 | PDGFRA |
| SEQ ID | SEQ ID | SEQ ID | SEQ ID |
| NO. 25 | NO. 26 | NO. 27 | NO. 28 |
| STK11 | RB 1 | CDH1 | FGFR3 |
| SEQ ID | SEQ ID | SEQ ID | SEQ ID |
| NO. 29 | NO. 30 | NO. 31 | NO. 32 |
| KDR | PIK3CA | TP53 | CDKN2A |
| SEQ ID | SEQ ID | SEQ ID | SEQ ID |
| NO. 33 | NO. 34 | NO. 35 | NO. 36 |
| FLT3 | KIT | PTEN | VHL |
| SEQ ID | SEQ ID | SEQ ID | SEQ ID |
| NO. 37 | NO. 38 | NO. 39 | NO. 40 |
| PTPN11 | CTNNB1 | KRAS | GNA11 |
| SEQ ID | SEQ ID | SEQ ID | SEQ ID |
| NO. 41 | NO. 42 | NO. 43 | NO. 44 |
| NRAS | SRC | NPM1 | SMO |
| SEQ ID | SEQ ID | SEQ ID | SEQ ID |
| NO. 45 | NO. 46 | NO. 47 | NO. 48 |

are completely sequenced and analyzed

5. The method of claim 1, wherein an abnormality in at least one gene indicates the subject has esophageal adenocarcinoma.

6. The method of claim 1, wherein the entire esophageal mucosa is pan-brushed.

7. The method of claim 1, wherein the sequencing is step is performed using ILLUMINA® MISEQ® sequencer, or an equivalent thereto.

8. The method of claim 1, wherein the analysis is performed using multiple filters.

9. The method of claim 1, wherein 5% prevalence for the abnormality indicates the subject has esophageal adenocarcinoma.

10. The method of claim 1, wherein 10% prevalence for the abnormality indicates the subject has esophageal adenocarcinoma.

11. A method for determining the risk of esophageal adenocarcinoma (EAC) in a subject, comprising:
performing fluorescence in situ hybridization (FISH) testing on esophageal biopsy samples taken from a patient known or suspected to have Barrett's esophagus (BE);
generating values corresponding to each of a plurality of data points obtained during FISH testing, the plurality of data points including data selected from the group consisting of average signals of each of four probes (MYC (SEQ ID NO. 51), 9p21 (SEQ ID NO. 49), HER2 (SEQ ID NO. 50), and ZNF217 (SEQ ID NO. 52)), percentage of cells with multiple gains, percentage of cells with single gains, percentage of cells with 9p21 hemizygous deletion, percentage of cells with 9p21 homozygous deletion, percentage of cells with tetrasomy, and percentage of cells with gains and deletions;
applying an algorithm to the values to generate a numerical score;
comparing the numerical score to one or more thresholds, wherein the threshold defines a distinction between HGD/EC and normal or non-HGD/EC.

12. The method of claim 11, wherein the one or more thresholds comprise:

[chemical structure]

13. A method for morphologic evaluation of BE histology, comprising:
performing fluorescence in situ hybridization (FISH) testing on esophageal biopsy samples taken from a patient known or suspected to have Barrett's esophagus (BE);
generating values corresponding to each of a plurality of data points obtained during FISH testing, the plurality of data points including data selected from the group consisting of average signals of each of four probes (MYC (SEQ ID NO. 51), 9p21 (SEQ ID NO. 49), HER2 (SEQ ID NO. 50), and ZNF217 (SEQ ID NO. 52)), percentage of cells with multiple gains, percentage of cells with single gains, percentage of cells with 9p21 hemizygous deletion, percentage of cells with 9p21 homozygous deletion, percentage of cells with tetrasomy, and percentage of cells with gains and deletions;
applying an algorithm to the values to generate a numerical score;
comparing the numerical score to one or more thresholds, wherein the threshold defines a distinction between HGD/EC and normal or non-HGD/EC.

14. The method of claim 13, wherein the one or more thresholds comprise:

[chemical structure]

15. A method for determining the prognosis of BE, comprising:
performing fluorescence in situ hybridization (FISH) testing on esophageal biopsy samples taken from a patient known or suspected to have Barrett's esophagus (BE);
generating values corresponding to each of a plurality of data points obtained during FISH testing, the plurality of data points including data selected from the group consisting of average signals of each of four probes (MYC (SEQ ID NO. 51), 9p21 (SEQ ID NO. 49), HER2 (SEQ ID NO. 50), and ZNF217 (SEQ ID NO. 52)), percentage of cells with multiple gains, percentage of cells with single gains, percentage of cells with 9p21 hemizygous deletion, percentage of cells with 9p21 homozygous deletion, percentage of cells with tetrasomy, and percentage of cells with gains and deletions;
applying an algorithm to the values to generate a numerical score;
comparing the numerical score to one or more thresholds, wherein the threshold defines a distinction between HGD/EC and normal or non-HGD/EC.

16. The method of claim 15, wherein the one or more thresholds comprise: [chemical structure]
